United States Patent Application Publication US 2006/0210537 A1 - sequence listing, part 4

SEQ ID NO: 74 - DNA, 570487 bp, Theileria parva
tatctagactactgtagccatcagtgcccttaatgtgccatagacttgtgaattgggttttggcaccagaatcaccagctgagagagcggattggacatcttggacggcctcaggtttgggttctttttcaccagtagtaccaggtttattttgttcaagttttgtgagggcttgagtgattgaatcgccgatatttatttgggttttaccactaccaccagatttgagattagttttgactgcacctgcctgaccgtcgagtttgacagatttgagagcttctgtggcaggatcggtgagatctttgtcctcaattttggcttcatcattgtgactggcaccgagggctcctttgacttcggcgacggcagcttgtcttttagcaggatcagtgagggtttcgagggcttcagtgacttgagatttaggaacaccagattggatattagtgatttcaagatgttcttcgagttgggttttgacggcatcggctttagtggagagaccattagcagcattgaggacagcttggatggtttcggtgagatcaagattgacaggatcttgttgagcttgagctgatttgagagcctgttcaactgcagttaccacagctgtggcgagtctgtcaaccttaccattgagaccctgtatgatagcttttactacctcagtggccttagatttgagagcgtcatcttctgttggatgctttgaaacatatcctaaggtccacagtacagctgataggagtgacagtaaaatggctaccacaaggtctatgtagaccatcaggaagtcactgttccacttccttctgttaccaaacattagggatgacaggtagtggatcagagaagtgaggactggaaatgagttttctccagctatgtagatgggtaaataattatcatcaatagcaaacgtcaacacattactgagaccaaacacgaatccagaaactgcaatcacaaagtagaaggctgttagatgacctctgtctccaggtacatagactaaaagaagtatcaagtaggttatgaaattaagccactggacagctatggaaggatagacaacggtattgcgttttagttccttgttgtcagtggcttctttggcgtcaccgtcttttttatatgtgtaggttttgccgaatatgttgtcaaagtctactgccagtttagctccatgttctataccgtctgccacaacgaatgctggaagacaccaaagctctttcactttttactactttatctaccagtactttatctacttcctttatctatctaccacatactcttcactttattacattacattatcactttactttattacattaagctttattagattacatcatactcttactctggtgttagattaccactttgttagattacattctccctccattagtattagattactttaacttttgttagattagctcatttctttctatgcatagtaacaggtctcttctcaggtctttggtgaacaatgctgctaggttcttattgcagttcttggaggccattttggtccagtacctaagggcattccacctagtcattcctgctgtaggccaattgctaggatcatgtctcttatactcaataatgtaaccttcagaatatggagctaacagacacatcagaaatgcacctatcagctgagccgtaagggctaggatgctaccacctccattaccaccaaagatacctggaaatcctacagccaatgagatctcatgacacatatagaatagaatggttagacatgtagacattttgggttggttgatgattgatctggcaactgatgagtctctgtaatgcagtgagtaaataaataaataggctaaaatgatcatggtaggaatcactaggtcagttaggtgccagtggtatccttggcctaatggtactccaggtatccagggtagttcatttttggctccccaattacatgtaggagacacgggattgaagaaaccaccaaaacctggtatcagtttaccacttctggcaattgccacatacagagctggaaatatggtggctatcaacagaaccatctcaatcttatccacgaggtaaaatggaacaatcattccaggagctatggctggatatatgcagtagactagacccataccaatcaggaccataagaaatggaaacataatgtaccaatgggcactatctagactactgtagccatcagtgcccttaatgtgccatagacttgtgaattgggttttggcagtaccttgagagagagcggattggacatcttggacggcctcaggtttgggttctttttcaccagtagtagtaccaggtttattttgttcaagttttgtgagggcttgagtgattgaatcgccgatatttatttgggttttaccactaccaccagatttgagattagttttgactgcacctgcctgattttggagtttgacagttttgagagcttctgtggccggtccttgaagatcagtgtcctctactttggcggtatcattggcagtggtaccaccgagagctcctttgactatgtcgacggcagcttgttttttagcaggatcagtgagggtttcgagggcttcagtgaccacagcttgagcaacaccattaccaggagtgatactaagatgtgattcgagagcttctttgacgctttggacttgaccttggagaccattatctgttttgaggactccactgatgttagtggtgagattaactgtgacattaccttgatcttgaggttgagctagaggttggagagcctgttcaactttagctaccacagctgtggcgagtttgtcaaccttaccattgagaccctgtatgatagcttttactacctcagtggccctagatcagtattggtttcagtcttatcttactagttttagtttaactatctacctagctatttacctttaggtatcacattttatttaggtattacatattacattctctaactatcttattactatcttttagtatcttattagtatcctttagtatcttattagtatctaactatcacatatcattcactttattacattacattatcttattacatactctcttactagattatattaccacattatctcttactattacattatatcttactctggtgttagattaccacttactagtattagattacattacattatcttattacattacattaaatactctcttactatctcttactcttttgttagattacatactccctccattagtgttagattagctcatttctttctatgcatagtagcaggtctcttctcaggtccttgacaacgggttagcattatctatttaccacattccagattagtttagtattagtttagtattagattagtattagattagtatcagattagtattggattagtattggtttcagttagcttacttttagtttaactatctaccttactacatacttttaggcattacattctctctttctctagtattacattacattactctcttactactttgtgttacattatcacttcgttagattagttcatttctttctatgcagagtaacaggtctcttctcaggtccttggtgaacaatgctgctaggttcttattgcagttctttgaggcctgtttggtccagtacctaagggcattccacctagtcattcctgctgtaggccaattgctaggatcatgtctcttatactcaataatgtaaccttcagaatatggagctaacagacacatcagaaatgctcccatcagctgagccgtaagggctaggatgctaccacctccattaccaccaaagatacctggaaatcctacagccaatgagatctcatgacacatatagaatagaatggttagacatgtagacattttgggttggttgatgattgatctggcaactgatgagtctctgtaatgcagtgagtaaataaataaataggctaaaatgatcatggtgggaatcactaggtcagttaggtgccagtggtatccagtgcctaaatcacttggtagccaaacaggttcatttttggctccccaattacatgtaggagacacgggatcaaaaaagtcaccaaaacctggtatcagtttaccacttctggcaattgctacatacagagctggaaatatggtggctatcaacagaaccatctcaatcttatccacgaggtaaaatggaacaatcattccaggagctatggctggatatatgcagtagactagacccatgccaactaggaccatgagaaatggaaacataatgtaccaatgggcactatctagactactgtagccatcagtgcccttaatgtggaacagactaacgaatttagttttggcagtaccttgagagagagcggattggacatcttggacggcatcatctttgggttctttttcaccagtagtaccagatttaagttgttcaagttttccgagggctgcagtgattgaatcgccgatatttatttgggtttggccagtaacttgatctgtgagtttagttttgactgcacctgcctgattttggagtttgacagatttgagagcttctgtggccggtgcggtgagatctttgtcctcaattttggcttcatcattggcactggcaccgagagctcctttgacttcggcgacggcagcttgtcttttagcaggatcagtgagggtttcgagggcttcagtgacttgagatttaggaacaccagattggatattagtgatttcaagatgttcttcgagttgggttttgacggcatcggctttagtggagagaccattagcagcattgaggacagcttggatggtttcggtgagatcaagattgacaggatcttgttgagcttgagctgatttgagagcctgttcaactttagctaccacagctgtggcgagtttgtcaaccttaccattgagaccctgtatgatagcttttactacctcagtggccctagatcggtattggtttcagtcttatcttactagttttagtttaactatctacctagctatttacctttaggtatcacattttatttaggtattacatattacattctctaactatcttattactatcttttagtatcttattagtatcctttagtatcttattagtatctaactatcacatatcattcactttattacattacattatcttattacatactctcttactagattatattaccacattatctcttactattacattatatcttactctggtgttagattaccacttactagtattagattacattacattatcttattacattacattaaatactctcttactatctcttactcttttgttagattacatactccctccattagtgttagattagctcatttctttctatgcatagtagcaggtctcttctcaggtccttggtgaacaatgctgctaggttcttattgcagttctttgaggccattttggtccagtacctaagggcattccacctagtcattcctgctgtaggccaattgctaggatcatgtctcttatactcaataatgtaaccttcagaatatggagctaacagacacatcagaaatgcacccatcaactgtgccgttagggctaagatgctaccacctccattaccaccaaagatacctggaaatcctacagccaatgagatctcatgacacatatagaatagaatggttagacatgtagacattttgggttggttgatgattgatctggcaactgatgagtctctgtaatgcagtgagtaaataaataaataggctaaaatgatcatggtgggaatcactaggtcagttaggtgccagtggtatccttggcctaatggtactccaggtatccagggtagttcatttttggctccccaattacatgtaggagacacgggattgaagaaaccaccaaaacctggtatcagtttaccacttctggcaattgccacatacagagctggaaatatggtggctatcaacagaaccatctcaatcttatccacgaggtaaaatggaacaatcattccaggagctatggctggatatatgcagtagactagacccataccaatcaggaccataagaaatggaaacataatgtaccaatgggcactatctagactactgtagccatcagtgcccttaatgtgccatagacttgtgaattgggttttggcagtaccttgagagagagcggattggacatcttggacggcctcaggtttgggttctttttcaccagtagtagtaccaggtttattttgttcaagttttgtgagggcttgagtgattgaatcgccgatatttatttgggttttaccactaccaccagatttgagattagttttgactgcacctgcctgagcttctagtttgacagttttgagagcttttgtggcaggtgcggtgagatctttgtcctcaattttagcggtatcattggcactgggaccaccgagagctcctttgactgcggcgatggcagcttgttttttagattggaggttttggatggctgcctggactgcagatttatcaacaccaccttggatattagtgatttcaagatgtttttcgagagcttctttgacgctttggacttgaccttggagaccattagcagcattgaggacagcttggatggtttcggtgagatcaagattgacaggatcttgttgagcttgagctgatttgagagcctgttcaactttagctaccacagctgtggcgagtttgtcaaccttaccattgagaccctgtatgatagcttttactacctcagtggccttagatttgagagcgtcatcttctgttggatgctttgaaacatatcctaaggtccacatgacagctgataggagtgacagtaaaatggctaccacaaggtctatgtagaccatcaggaagtcactgttccacttccttctgttaccaaacattagggatgacaggtagtggatcagagaagtgaggactggaaatgagttttctccagctatgtagatgggcaaataattatcatcaatagcaaacgtcaacacattactgagaccaaacacgaatccagaaactgcaatcacaaagtaaaaggctgttagatgaccttggtctccaggtacatagactaaaagaagtatcaagtaggttatgaaattaagccactggacagctatggaaggatagacaacggtattgcgttttagttccttgttgtcagtggcttctttggcgtcaccgtcttttttatatgtgtaggttttgccgaatatgtctgtttctactgccagtttagctccattttctattccgtcagctataacgaatgctggaagacacgaaagctccagtgatgttgccattcttcttacaaagacactgaagaggttttctggcagcctaaatctcatcagggcgtatggagctgtagagtaacaaagtctaatattaagcatcatagcaaatccaccaaacacaaatgcggcattgagaatgggacacccagctgcgtagccagagccctcagcacaggcattaccatcattgtggagactttccattagatgagagccaactattactagggctatcatggccattaccagaattgacagagccagtgacagtattatgatccacaccttggacagtctattcatcagggctatcattgctacagtcacaccagcagccaaagctccacaggcaccagccccatagaaataccctgtgtgagccatctcagtagtagcctttggtgtctcactagtctatagtagttctttggtatttctgatttggtggtctattacttctattttattgttactatggtactctttacttccaccttggtagtctgttgttacttccaccttagtagtctattgttgttactcctactataagactctcgtatgtgattgcgatattattactatggtacagaaatattggttaaataatattatccatcagaacaacaatcctcatcatagcatcagagttaaacatcatctatttgatggttggagtgtccatattgttatctcaagtggaacaggaagagatgactattataaaagaaatgatactggagatagcattaccaagcttaagagaactcttcgaacttatgagtcgagaccaagtaatctgtattacagcatgatttgatataatatcagattgtgtaatattatggcattttagtttttctctcatatttaacattctggattgttatggaatatgttgagttctggattgaatccctgttggtcttatagtattactagttatctaatgttaactctgatatcagtatcattattgaaatttgataatttcaactgaccgtttactagtgataaaataaataaataactgagttaaaggtatatgggtttgtgttactatattaggcgtgaggagttcatcagatgtttgatggcatttttcatgatcagttgtccaattttggtttttgaacagagtaatctgtggcgttggtacctcagttccttcttccttctcctttccgtatccttttcttcaagtaatcgggatgtttgttatgtttatccaaaaactcgttctcaaacctctccctcataccaattattttaccatacataccattattgtttagatttagagagttgtgactatttaccgggttattggtatcaacattttgataaatatttttatgagaatttggtgttgaattagtatatgaagtgatcaactctatattattatcaattatatcttgatcatttagggattgttccaaatggagtctcaattaaaggatttattattttcacattatcaagaacacctattgaattggttgccattctaaactgtgttagtagaattagaagtattggtagtatcagtattggaagtatcagctgtatctatattgttaggtgaatttattttgttttgttttgttttgatgaacacttttctcgtattgatttaaatatttttggtctataatatattgtttattctttctttggatgtgtttgtttttaatatctactgaccggtaagatccatatccctttaccttcttagccttttttaccccaaattccgattaaaacatcaattaatattttatagtacattttaaaattattcctcgtaacactatttattaaaaaatataaaatatttttttctaacactataattaatttgaaataatatgtaatgttttaaaatgaattgtaaaatatggtaataaatttcgtaatttctaattccggtttagaattccacaaatctaataaaaaatctccacatccaaaactcaatcttcttcaagaacacttacattttaacaagtaatcacttatttatactatatatagattgttatgtatggatatagtaggtatatatcattaatatatcaatactattgtagtattgaggaggatagaaatggatctgactatcgtcctgatctagttcatttttgtttattatcacttcaagattcgattttgaacaaagaggggaagattcaggtgtacttggagactcttcagggccacgttttcaaggtttcaaattcctttagggtccctagagcatttaaggtgttcaacaaagttttctctacttttttacacagcaagtccaaagacctaagaactgagtctggtgacattttgatagagtctgttgtcaatttggaccaattaattccagactcttccatcaaaatcgcaattgacaacagatgcccagttttagatattagggctgttctatcccaattaactgttgattttgaccgctgttggttctttttctcatcctcccaaaatcgcaatctttctaacatcactctctcaaataatgtagaaattaaagctatacataaggaactactcgaaagggatgatctaaccactagcacataccccaataaactgcaatccttagaagataaatattttaaatcagtcaacaatttagatccatcaaaccattccaattcagtaaatattgtgaatggagtggatagtaaatttgattattgtttatcaattagagattataacatgagttgtctttcaaattgttatactctcgtttgcacactagaacaccttctcaattattaatataatacacacattttatcaactaattaactgtatttttatttattaaggactagaataaataaattaagtgtataattaagcttaaatagtatttgacctttaaccatagataacatataacacataaatatattgcaacatacagttaactgttaatttaaaataaaaatataaaagagtgtaaaatattaatgtgaataattctgaaatttagtagccttgaataaaacgtttttatggttaaacttttgaagtttcacaccaaattccaaatctctcatacactaaacaacattacaactatatgtgtagttacttgtgagtagcgatttataaggtgagtttgattatttaggttaaggcagtccaaactactcttgaatagcggtttgttctcactcaactcaatatgcatactaacactcctcatattcggtactaaagactaattaacactgttatatactttatataaggttaatatataacacatttagggttatacaggttataagataactagtaatctcaagtgtgtataaataagtgaactagtgtaaaatatggataataatcccaaggaaaataggggaatcacccccagtgacaaagtacccataatcattggagttggttttgtaattttcctcgtgacagttttgttggataaatcatcagaagtggaaataatggatgagtttcttaaagaaaaacgagagtttgtcttagaatcccctaggttgttaagatcatctactagctcctgcctacgtttttcgtgatccttgagcctcaaaatctgagagggatcgttcttggcggactcactcaacagctcaatttcgtgtgtataacgctgaatttcagagatcaacgaagtttttttattaggaatagaggatctttctcgtaacttttgttccaatattatctgaacatcctcatccgtaaatgtaaactaaacacatcattaatactactactagtagtataaaattagtgtataataatcaatgaaaactaaataatgtatataaaaagatcagtgtgtaaaactgagtccacgtgggaagttaaagaatgaccaggtgttaaaaacagtaccgatttcaaattatcagaaatttgtttaagaaactctgcaaaatactcatcaccgaaattaagttgttcttcttgaaatgaggaattacaaatatcacacacactgacgagcacaaatgtgttggacgcttcggtagccacatttaagaccttaccacatagtacatacgagcactttgagaggaaaagctttgaaaagtgatcacaagaatttaaattgctaccgaaaacgtcataagtttctgagggaacagcacattcaatttgaaaaacgacgtgttttgagatcagttttgggaacaattcacaaattggaacagcctttaggcgcttaggagatgacttaactgggctcaaccttaagctctccactgtaataaataagttaatcagagcacctgaaaggtactcattaaagttcggatgttccaaaatgttcaaagttctagtttttgataattttgccgaatttgcaattgacactgttattggattgaatgttggtttatcatcttcatctttactctgggatattttacccgatttagctactttaggatcagatttggaggcctttgaggtctttccggaacctttattatcatctttgaataaaacacctggttcctgtaatttctctgaggtttcatctacaacatcatccaaatagtacaaatcttcgtacaaaccagtggaatcaggtccaactccagaactttcccacaacaaactcatcctctgcttaagcctaacttcctccgcgtgtttttcagccaaaagaagttctctctcgaactcaggcatatccgagagttcatcatcctcaacaggagaagcatctgatgaatcctcactaaccattttttacattatttctaaatttaaaattattctctcctaaaacaataacaatataatatacaatacataatattgataaattgttatataaagtagttgggcaagagattattagagaaaaaatgttccggaatgaatctcaaattaattccaaaaattttacaaatttgctcaaaaaaatgctttatattttaaatggatcccatcccctttcagaaccaaaccttgtcatatactactatattcaaaattatctaattataataagtttaatatatagtaaaattactgtattggttagatttgagaaggtgtattgcttgatttctttttcttagtaaaaatccaagataaattcctcaactttataataatttttcaagtcttccagcttcagcttattcattaagtatttttccaaaattttgtacgatctcccaccattaaacctaactatttgtccgtattctgttaatttcactattaactcaggatctaactttgaaattactgaaccataagctctaaaatcgcaatatttcaacatcagtaacaatattctcaactcctcaacaatcttattaaaattgttcacacattccaatccaccaattatccctctgtaaatatgatccagtttatcactattcacttcaatttttagtaaataaacacatttaagtataacgtataacaccagtatattagtcataccactgtttaattctggttgtattataacattatcctctacatactgtaatacgtattgggtcagtggttctgggaagatccttgtattacttgcaaatgtcaacagtttacttatcaacttgaggtttattttgtttttcccctcaaaaatttgtaaattgcgtcaaacaaattactcatatcacttacacattcataagttaaattacagtgctcaattccatccaatattacatcatacccatacaacacactagagttagttgataagttcatgaaatttacagatttattaaagaattttgacaccaattcagttgtcaaattgttgaatttgtaaaccttattcttaatacacaaatttatcaaaaatatagcctcattgccaatttcactcatttcacaatcctcgatatttctataacacacattaacagatatataacaaatgttaatagtatatagcatatagtattattatactattaattatatgtatagtttatataattgataaagtggcagtggtaaaaaaatacttgaagtagttcattataattgaattgatatatttagagtaatgtttgattttaatgaaatctgacaatgacattaatatattcttaacatcctcatcaattttcggtaatttaccatcaactgtattaaaaaggggtaaaactcgatcattaaagtagttttcaaccaattgtgctacaatttctctatttttaaccaaatttaacctcttaaacacaatcagcaaatgatgaaattgtggaaagtccaactgattcacactgtttttatccaatttttttaacatcaacatttttatcttattactatttgttaactgtaacaaataagtcaaagttggtaatgccgaattcatgtttaaatttacaaatttctcctcaaaacacctttttaccatatttaataacatattaccacattcagcgtataaattctcacctaaatctgtacaatttaacttgaaatattgtttataagagcttaaaattgtaattaatgtttccaactgttcattattaaaggatccaaacttatacaccacggaaagtaccatacggttaaacaacttattttcaacccaattcatcttcaatagaacatagagtagtgttaacaactcattattatcaagtatataaacataattactaaccttattaataaaattatatatataatcattattcacaaactctataccatgtgttaggtgtaatatttcattaaaacatttatagaacactgtagaagtggacaaactatcaaataacaactcatttatcaaatggtttagataagttccatcaactttatcaaccaaaccaaccttacaaactaaatttgaagtcaatttgagctttatgatcagtctttcatcctcagaatagtttcccctatctaaagcattcagtgtacaggcgtgtaatttaagtatcaaaggattgacatcttcaacaccaatttcaagcaaaaaatttaaataatttatcaatatttcagtgtccaaactatccaaatttgttacaactaaccggaacaaacattgtaccagatcattatttatgatttcatattttaatcttaaaactgaatcatcttgttgtaatgtgttaagtgtgtgtatataaggagttaatgaccgtataatattaagtttgtaactcaaaaaacatgacaatgttttaagatcacaattgtcatttaatttttccacaaacttaaaactttctagtttagagaataattcactaaattcagaagtgacaggacttgaactattactttgattcaagcatttcagattatctcgaagaacctttttattatactttaaaaatttattattaactttaaaaccaatatcatcaattaattcgtgtaaatttcttacacatttttcaaatacaaatttaccagaaacggatgaattaagtgaataaactggaaattgtgttaaaaaaatcctttttctaaacaaaatcattttaatctatagaaaaccaagactatttacagaaattatttgctatttgtcatgtttgaagcatatccaatgattatcaatttggtattttagtgcttcaacagttaaatctgaggacagactgttaacaaaatctttatccaggagtagttctaaaatcttgaggcaataagcgtattcaacaaacttaatataatggccagtgcgccaatactgtaaatataatatatatgctctaaaattctcatcattgaaatagcctttatcgaataaatgcttcagataataaatgtcagataaacactgcacaaaatccaattccaccccaaatctaagattatctacaacatatattactatttctatggtaaataactaaattaagaagtttaaaatggaaaattggtctaaataatgagtaaacaacacaccttcataagaattatttctataataattacgtaagtaggatttcataataggataaaaaatactcaaaacatttttaagttaattattttttgtgccgatggggaatctcgctactatatttactaaaattattctttttatactttaattttcattaaatctaatttataaatagtttaaactatgttttaatgtaaaatttatccataaatgggccaggttttttttctacagttatctataccaatactatagttatatacagtttaattatataagggtacataatatagttttagatgatagaggtaattttaaatgaccgtttgggtcgtaaaataagggtaaaatgcaattcggatgatacaattttggaccttaaaaagcttgtagctgctcaaacaggtaaattcataaaaaatttcaataacttgattattgatattaattattattaaattaaataaaaaactatcatatatattgttaggaacgagacatgataaaatccgtattcaaaagtggtataccgtatacaaggaccatatcactttggaagattacgaaataaaagacggaatgggtctcgaacttttttataactaaaatttaccttttaaattaagtttgcagtttttaaatttatttcaatttttgaaaatttcaacctattttccaacatagatttgtaataacactttttaaatttgattttgtttcttttgtttttatactttatagattttacatgtattatatatgacttttagtactaaatgtgtatttgttaactggctcttgtttggttttggtgtgtaaagcattctagtcaatgttttacgaatatgttgaggaacttttaggaaaaactttttcacttttgtttttctccacaaaacaccttttaaataatttaatattattttaaaatggtgtttaaaagttccttttttagccttacacatctctttccgattgtcgtcacactttcttaaatttttagtgtgaatgtattaatggtcccatccataatcttaaaaataactaatttaggtgtatttgtacttgaaataatctaatctaacccttaatatcctataataaagtcacaatcaagggttgattaatgcaaaatttaagataaattaaggtataaataaagtcaacttgattataaataaattttattgtgatgtgtaatagaagtgaaggaggtgtaagacataaaaaggatgggttgcggtagtgtgggaatggtatgtaatttgagatgtactaaggtgttgattgcagtttttacatttgtagcgtcgtttttgccattgtttttctttctggtgtatcattttagcttttactactctagaaatttggttgttttgtatgtgatcttggcgattttggggttgtgttcagtgggtttgttctttgccacgtctttttctaatccaggctatgtcaaaaaactagattttcccactcgaatgttcgatcacctaaaattctcattcagaggcactaatccaccacgttttgttgacatgatgatcaatggacagccaactaaggttaagttttgcccaacttgccactcttataggcctcctaggtcagttcactgttcagattgtgaccgttgtattgttcgttttgaccaccactgtccttatgtagcaaattgcatcggatactataactacaagatattcctgtcttttcttttagtttcttctctctacttttcgcttattttttcgctgtttatttaccgttctgttgagttttttccctcgttatcgtcaagtgttagtcagaaccctactgacatcataggcacaattatatttatgatcataactttcattagcatctggctagtttttggtctttacttcttccacatgttcattattcgaagcaatttgagcacctacgacaagctcaaggaacactttgacgagttcaacccatttgaccgaggcaccctcaacaactgtaaaactgtactcctttataatccgaagaaacatactaacccaaatcaagacatttacaatccatacgccatgtacactctcaaggtacacgccaaatcactcgataaaacattgtctttttaatttcttactcaattcactatacacacacactacttatagtactatagtatatgttcacatatttatacatatatatattaatatatatatatatattaatatatatatatgtatgtttatatttatacatatgtttatgtttatgtatatataacgattttgaaatattatgtgctaatattatcaatatcgaaatgaggtctagaattttgtaaatctggttcggtttgcatcctatgtaaaattggtaaaccagattggagtagcagattttgcttagttatacggtctgaggcctttggaggctcagcattataaattaaattatcctcagtttcctggacaaatacaaaatcaggaggcagtagaggcatgtgtttgtgcaaaaacttaggtttagattccaaaatcttctggtaaacctcatccatcttaaaggaataaggatttctagtgatatatgttaaaaaatattcaatatctaaaatttcaggggatattcccttcccatcatcatcctgttttttcaaactcatactgttatacacatttaaaaatccatgagcagcaaaggggctggtattagaggcgttgagctcagataaaagctcagtcgtgtttatcatacactcgtaatagagagctgatggttgtgaaagactcactggctgtgttaaaatatcgtgaggtataattggctcgtatctaatcaacggtttagtcttggagcctaacttctccttaaaaatgtaattgtaaaccgttgaatcaactgtctctaaagctttcataacatcgacaaaatttgtggtttcacagcccctaactctgctcatctcagtggctttacgacctaatgtctttacgtgattcacgacaaagttggtcgcagcttctaaggaaaaaaagtcgatcctcttaattccagagcacagagcaatccatgcaacacatctgataagccattcctcgtagtaatcagatatatcagactcgagttgccgggggttgaggacctgaggaggaataggagtactttgagagtcgcccaaagatacctcattatcttcttcttcattaaaatcatcctctgcaagattatcctctatttcttcatcgttaaaatcaagattctcatcgtcatcgtccattattaaaaattacacccatcatagtaaactacccataattaaacactactataataagtatattatagtattatcaaattggctacataataaattaaaataactgaaaaatcgaaccagtaaaggtgctgctatcgcagaatgggaaattaccctattaagtagagagttaaagttagtttatgccttttgctatagaatccagccttttaagtgtttttatatgtattatatttttgtttcttgtaaaatacctgtacctctgataaacacccttaaaatcaaaaatttgtaaattatatttagtttttacacatttactttcttaactcagcaataacagtattttcataaataaaaatatcctaaaaattgataaccataagatcacattccacaaattgtgaaattattatacttcttaacactcaatgaattttttaatagacggaatagttcaataatattcgactatgaatcttgattttgataattttgattattatgacactttaaacgttacacctaatgtcggtttttgagttaactattaacattttatttaattaatttgaccttaataactcacatttagtcctctcaagatgaaataaaaaccagttatcgcaaattaattcgtttatggcacccggataaaaattctctaatttcagagcctgattcctcagattatacctctgatcagaaccaccaagctctcaaggacacacaatcattcagtaatgatggccaatcactcaataaaaagcgtgattccgcctttactaagatacaaaaggcttattctgtgctctcagatcctattctaagatcccattatggtaatttaccaccaatttatagtttaattacctttattgttttttattatatttacagtatattttttgtaaattatagtacatttacagtatcttataatattacattgtattacactattataccattattttacctataaataacccataatacacagatttaagaatgttacagataagtttggacatgaaggagcaactttggcgaggctagttatgaacgagaatgtgagtgagaagagtgtgtacagcattccggaggagttggacagtgagagtccgaagcaggagattttgagctacaacaagagtgaggactacgtatctagaagagttcttcttctccttagagaccgttactcaagggagatgaagcttcttccatttcagctgatcaccaattatacctttaacttaaggtcagatttcctgtctgattatgtccagtttaaccttgacaaggataaaggtgttccagttcgaagtttactgggtaaaaggcacctttatatgactggtgtgatactggacaattccatggaattgctgtataacaagttcaggtttggttttcacctatcgtcagtccttaacaagggtacttttgggaacctttttacccgctttgacctcagcaaagatatatcagaaaccgttgaatttcgtattagcgctgataaaacaggctttatgaaccccaaaatgctattattgaatctcaggaagaagtttactgacaccttttggtcctctctcatattcacgctttctgaaaattttaccccgaatctgtttgccattttcaacaagaacatcaataaacgccattccatacagcttacagttaccaacggtttatacctcaactaccactatttgaaggtcattagtaagtacactaaggttaacttcaaggctgtagcctccccagacaacatcggaattgagctcagaagtaagactttaaatgtgtttggaaccactttaggcgccttaattcgcctctgtttgatgaatggccttagtttcgagtggttcttcagaacttttgtcgagtccagttacttgggaattatgaaagttgagtacagactaagccttataaataacaaagtaatattgcacctcaaaggcattattaacaattcaaaggtaaatgtcccaattctcctgtttaaaggtgatcaaaactttgccatatacatcatttcatctctgacaattattactctttcattacctctgttttactctacaatccagtcattatatcagggaagctgtggtctgataagtcactacactaacaaatggaactctcaaactccagaaaccgctggaattgtgagtaggttgagtagtataatgacgaatgacgaaggtgaaattggcctagagaaacttgaagatgttggtagaagcttttacaagaaccctcttaggcataatttttactcttctttccctcagttcttttcaaccaccaactattacccctattctatcaataatggttctgatccttcatcacctctatataccaaccaacaacttgagggtaatttaaactatgaactgaaacacattaaatattatcattacaatcccttaatacccgacggaggtgtgatacatggggaaaatagcgcacaagttaaaaatgatgaggaaactgtaaactctagtgaggaactgattatggcgttggaggagaacaataagttgcataacatggctaaattgaattattttaaggaactggagaaaaaaggtttattggtcctgtttgccctttatggtcaccctaagttacttgaatacgtaaactctcactacaagtctatccactttaccttcaataagttcaccacttacgaagatgaacttgaaaaacttctgaaaagctctaatttggacattgatacctcatttgtaattaacgtaaccaatgttctcatgtcaaaagtcaacgaatcttgtttgtacctttcaagcagtaataaagactctctaattggtttcaccaatccgcatcttcatttatccatcaaacctaaattactcgtcgtgtaccacatacttatgttatacattttaattatattatatactctatttatattatccagaatatttatattatcaattttatttatataatacgatgtatttatactatccataatacttatatattatccattacaacacatatactattatacagtattataattgtgttttaggtataaatatggaaatgatgtaaaatcgattttaataaaaaacacacaatatcttgttttaccataatcttatcaatgtatatgatataagattaggatttaattattgacattaagttattaatgccatttatcatgtttgaactgttatcctacaaattaattagtttaaccaacttaatttaataattgaaataattaaataattggttgattatcggaataatggattgaataatgaaataattagtttaatagtgaaatagttggaataaataattactggactaataagttgaataattaaataattagttgaatcgtgaaatagttaaaatgataccgttgtgggagtggagttatggtcaatgtgagtgaagtcaatccacttaattttgtggagattcgggttactttcatcaaatattatgagaattgaggaggcgactatggaaatggacttctggaggtttatccactcacttaagcgctctagaaaggatattaagttgagcctaataatctccatcctctcatccttcttgaatatgctaaacatttttttaaagtttaaactaacttgtcaagcaagtccattgtttgagtcttagttaaggtcttggcttcattgcttgttattacataattcttattctaaacgattattaagcttatttacaaaagtaattatatatatatgtataggagttagtgtgggatagtactggatgttgtatatatattgaagtaattcgaaaaccaagttcttgctcggtggtttccaaagcaacttgcttctgcctccaggtctttattagcatgaacagtgtatgcatgtccaagttattataagattctggcaatcccaaatctgacgcattaaagttctaaacattagttattcattaggtatattattaagcattattattagtatataactaccataatacatggaattgaatgtataatgagataaggaataaataggaaagtaccggatgtgattttaatgttccattgagaacagaattgtggtatttgttctttaattctctccaaagttcaacggattttaccttaatcttatcatcaatttcgccataacactctaatcaacagatattaccaataaataaaaatgtattaactgaaacaataaaataaatatggagatatggttgtgaataagaggatacgatcatcattgacgttgtgtgagccgagtttgatgtcaataacaccgggattttcaagcccatacattaagttttcaagctaaacaattattaataaaaaattataaaattagtgtaaaataccttaatggccttgaatgtgttagcggatacatcaattacatgacccagatcataccaacgataatctaaaaaattaagttacacaaatgtgggatagtataagagtgcgatgtgtaattagaaaaaattgtataaaaagttaaattaccttcatatgaaatggtagtaattccataaaaaagaggaattaaatcattatcgatgagataggaaatattgtcaaaaacttcaggattaatgttgttaactctgaaatcatttaggtgagggatcggaatgcgataagcaatcgagtaaaaaacagcttcagtagcagaatgagttttaatcaccttgtagacaaaatttcggccaaaatcccggagaataaaggaagttccgctcagttttagttggctttcacccatgatttcgagcggaattttagatcccaaattactctcaggaacttcctcctgcgacttctccatttctatagattgagctgatttttccagctgaactgacattaatatacaaactatataaattataattttgttccaagcaccactacaatttattggattaaaataattttaaaaaatctcatttttaaaaaattcttgctgatttttgttaaactaaattaaattctacaatttaagttgttaatttgtgtaataatgcttaatttcgagattaaatgagaaatgtgtaaaaagagagtattatgaacaagagcaatcagcttagtctaatgaaattagtggtacaaaaatattaaattaagcttaaaatttaatttttaggctgaaaaagccgtagatacttacgttaaaagtaattcaataatcgcactggggactggaaggaccagcacatttgccctagaaagattagcaaatcatattaaaactaaatcaataactaacattttaggaattccaaccagtcaagctacttatcttaaagtatatgttaccatcgcttctctgcttttattatatatacgtacatattatatatataattattatatgtgtagtgatgtatgattaggctaaggagcttgaaatacctttaattagtttggatgaagtgattggctctgaccgtagaataaacattgcgattgacggagcagattccgttgattctgatttgaacttgatcaaaggaggaggaggagctctattcacagaattcatggttgaacaatattccgatcaactcatcattgtactatatttccttaataccatagttaatgatattttaattcctcattaactacaggtgtaaaatattgattagatgatagatgagtcaaaactatgtaatgatcacctgttagaatcgcattatttaccaattgagatagtaaaagggtgtcatttaaccacatgtaagcaaatatattcaaaatttaaatctcaaatcgtaaattggagtgtacgaatgaactcagatgggtcactcttcttaactgataacggcaatgttatcatggatacacaatttaaacaaacgcctcttgatcaattacaaaaggatctcaaattggtactttcatcaactttacaattacttagttagttataataattatttaattgaatcaactaatatgttttcagatacatggagtagtttgttcagggctatttttaaatatggctaccaagtgccttgtggcaaaatccgataacacaattgtaacacttgaacgttaatttcattttttacaccattttttattttcacactactaacaatttttattaatataaaatttaatcacttattgatcttaaactttcaataatataattttaagtattttttattatgattttaactattgattgaaaattttaaatttcaagaataaattatgtttaatgagtcagctaccacatcaccaaggaaatatgatgactggtttgtcgtagatgagactgattttatgctatcagactcatctattagacccaattcatctacggaatcttaccaaatgctaaccgacgtgtcaacggccgcggatagttccatagaatcgacatcaaggtcccaactctccaaaaacgtcgattatgaatctttcatcacagataaagttgaaaaaatgaacaaagaagctgagggtatttttaaactaattttatctcaattttactgatcaaaaatatagctaatctataatcagtatataatcaaatcatcctataattaatttgtttaataaataaatttatataataaaaaaatagtagaaaattgtaataaaaatgatttagaagatgtgaaaagaataaaggatagaataagtgaaatcgagtctcgtttgaaacctttggacgcctataagggccaacataccgaacaccatcatccacagctggaaaagcttgacaaactgttggaagaggcaaggagagaggcaggagagattcatgatggtgcaaacatggcagtccaagaactgaaaaagtcagtagaaaacgtagaagagttgtgttccaaaggtttaactttgaaggattctgcagacaatttcagaaaaattgcaaacacagaaaaaagcctcatacccttgccctttaaaactaagatgattattggagtcgtgaccttccttacttgtgatttcttattacacatactttaaacttattctcaaacataacttatttaattttattttttaccctattctcattagtttattttcatctattgttaagtaaattatttccaccatttccctattttttactcaactccatccaccctctatcgcttttacttatacactatttaggtatttttaattgttttttcccataattttccattcactcgattctaacattttttgcaggattccatcattaacatatagatatttgtatttaatactttaatacacaataacgtattatgttatacactctaaaataacactatgagtaaaactgtttaaaaaataacttcagttggaaaatggttagtatatcagaattgagaagtagattagcttcggctcagtctacaaaatcaaaattaaggctaagtaaccttcagtgtattgacttactgttgaaaatatgtaaaaaaaagggagttgacctaattactagcacagatgggatgttattttacactctcgaggaggttcaagctgaagtggaaaatgaactgttgtccagaggtggtagaatccctatttttgagctcaactctgttcttaattttcaacctgaccacatcgacagggcagtttccaacatagttaaacctggtggagaatatctaaattctcacggagttattataagtaagcaatatcttgagcgactaatgcattctattgatgaccgaattcaagagtgtggtactgttgcaatatctgacctatcaaaagagtacgaccttccactagaaatgatgcgcacatacgtatcggctaaccttggctctattattaaggggaatattaacgggaatttgatagaatctttaacttttgagcagaggaaaattaacaactttctagcctcagttttggcaatcacaatgcccatctcaaccaacgatttatccagaattattaaacaaaacatcaatacggtaaatgatacacttggtaatctgattaaacagggtaacgttaacggctttatcaagggtaatgagtttgttcctcagtgttacattaattcagttgacaccttcttaacacactattacgcccgtaacggttatattgaggttagtctcatcaattcatttcattatttcacaacaaacaccattaataaacatacaaataacggcatgaaacacaataaagccactaaatctaaccacaaacccataaaacacactaattcatccataaagaatggcaatttaacagttaaggacggaagttccactgtaaagaatgatatcaatactgttcacggaggcatattggataatagtgtaaaattggaaactgtgtatataaataaagaattatttgagccagtgagcatactaataaatgagtcaataagtaatagaagttggagtgatttgggttcaatgttaccttcaattttaacggcaaatgattgggcaattgtagtttcgactataaaaaatgcatctaagaatgggactctactcaataccttgtacttatcaaactcatttatcgcagatttaaccaagtatatcattagcactatggacaaatgtaaggataaggttgaggatttcagaatggttttctacaaatctaaattatcaaaagatcatctgctacattgttttaatctgattatgtcgaatgagttttccaatgatcaactcaatgagagcactttagatgttctcaagggtcctgattcttctccaaactccaacaatccttcagaaacacactcaaatatgtcatcacccttacatttaagcactgatacatcaactgaggagaacattgaaaagtattcagaattgtatagtatattaaatgactcaagtgagttatttgaactgatagaacttgaattaaagaaggagctgttggtgataatagctaatatgaataaggttctgaggtcagataaggcaaaagtatcctctgatagtactgaaaagcttatcacacacttgatggagtgtgaactgactttaaaagcctttgatttggtaaatcgcgacaaggttgatacaacccttaagtcagagactttaaaaccagatgttaaatttcaaaaggccgttggcagtcctgtgaaacctactgaaattgtcccgaaacctgaaatctacgttttaatacagtttttgtctaaggaattatgttcttcagtgtttaagctactgttagagcgttacttgatgaacaataagttggttgatggtccagtgactgttgactctaataaccgtagtaagatgattgagttgatagtggacgatgatataaaggagctttttaagacttttacaactcatttaaagaataaaaacgcacaacagtgcttatcaatctcccgagacctttgtaagctcatgtacatcaactataacgtgaagaaggattcccgtaattttattcgttcaaaactcactcattttaatcaacagctctcttcactcaccaagttggattctattctcacctgctacgcttctctaaacattatattattgaaggccaatcactatgtgttcttctgtgacaagctttgggccgtacgcgaggttcttaaactcttcaacccaattttatccactcaccctcaacttccactcattcagtccattgttgaccttgttgaaccttctgatcctgctaatttatcaccaacaaatacatccatctatacccaaacaggtatttcaaacatctttactattccatagttaaagttattactaattatcttgatattatagttagttgtatattattaattatcttgctactgtataattatcttgatattggtgaaaattagttgtatattggtagtaaaatagttttgattattaaaaaagggatttaatttttaaaactaggtcctattactacttacatatttatatacatccacacctttattaggttatttagtacatgaatatatacacaatgttatatgatattagataaagaattggaagaaaagacaatggagttgattaacgttttcaaggtttaaagtcctttttatcaattgcatcagtctaatatattctatttgttatacacacttacccatgcttttgctattgttcttttcatttcatcatcaccctataatttatataattatacaatgatatatagagttataaagtaatatatgagtgattacttgatcgtaaagatttttcatcatatccatgagcatggtttgtggatttgattcattggttttcggaggtaatagtttcttttcctaaacatccatgtggtatgttgtgatgggtaccttatcaagagttgaagttaatgatgaccaattagtttgattttcctgataaatttattagaaagatttaataccttttcaagtttaacttgcaaataaccacttttccatttccaactacctaatcaaagttatacacattattaatactatcaactacatcaaatgtattaactacatcaaatgtattaactacatcaaatgtattaagtatattaacggagtaaaatgtgtaaaaaatactgttgttaattttagaaaacagttttttaagtttgagctggtagttttttggtccacaaacaaactgcagaattttagaaattaatgcataaaattgttagaataccttaatgtccagtgaatctgagttaatatcgacattaacgtcctttggctcttcagaaactgggaccaaaattctaaatgacatttatgggtttacatgagttacttacgttacatatttttgagtttgatcccatgaaaatgatgttaaagagttatatactacctaaatacagttttatcaaagaacctagtcaataaggagtatataaagttaggatattttatggtaaggaatgtttaataatatactttcgagacgttattggtatttttagaagcattcaaggtggattcctaaaaattgaagataaaattttataaatttgcagagaataccaaattgccaatgaggtgttcaatctgtgttcttacggaaggtctagtggcgatatttaagagactacgccactcttctaaatcagccaaactcatagtgataaaatatattaaatgtacaaataaaatgtagaggagtaaattatgtttgagtaaagatgtcgttatcgggtactttgtaatcgtataacttattctcttcaacatatttcattacatcaggatgcagtaataagtttccgcatttctatattcagtgttatataatagtatagtaaataattactaataataattatgtaactaaaatgatggtaggatatgtgtattacatgtccatgtttgagagtatctctgacttgagtcgacgaagctggtgatgtttgagttttttgtccatttttccataacaattcatccaacaatttataacttttaagcttgttcaaatcttcttgtttaatctcaaaatcctcacggtatgctattaaaaaatgtgcaatattgactaaattatcggaatgaggcctaaacatttttattttacagttaacttaatatgtcaacattatgtggtatagtctataaagaatacaactagtgccaacagtatgaaattgtgtaatatttttatattaatttaaatagtaatgagtggaaactaaccaatcaaacatctgtggtaataaatcggatcccataaaaaaataaaaactcttttcaggttctgtatcgttaaagtgttttaaagtgaaataagtatcaacataattagctagttttagttcatagtctgagatgttaatctttaggttgggatattcttttttgaagaggtccattgcgatttgacacattttagttctatcttcatctttggccttatattgtttatcttcccttttaccgctgggcaatatccttatttctgaaaaaaagttagttttaatacacaaatccagcattatcatatggccggtggtaatgggatcaaaagctccacaaaacaagagcacgttagttacagcattcatataatccttatatttcacagaattaatataccgatgagctttattgaggaaagaactatttttacaggatgaaatctttaaaaaggtgtgaattcttggaaaattaaataatctattaacaagcttcagtttatcaaaaaattaaagttaaccaaatagggctagtaaattcaatgaaaattacaatgtaattgtatgaataaaaaagagttatttgagtaaattggaaatatttcaattttaaatcacaaactttaatattttaacattattaaaatgcagaaaaagttatgaaaattaaaaatttaaattcattatacgaaatttatctaatagtatatattgtttatttaatattacattgatggaaggctaaaacactataatctatgtgtcaaaagatgaggcaaaagtatgattataccttataggttcatcggtgttaattgagggttaatttatcaaattttaaaacaaaagtgacaaaaacttagttatattaatgaattgatttttgtattcgtttattatatttcttgcataaaataatttcattctgttgttaccatcaacaatatttatattctattatttaaacatttttatttcttttatattattctaggtttgttcaatatttttaccttgttgaattgttataaatttgaaattaaaaatggcggttaggcctccttagctcagtcggaagagcgccagactcttaatctggtggtcaggggttcgagccccctaggtggctatctttttataaaattgttttaacaaatgaaaattattatttatttaaaaattaatactaaactttaacatttctcaatagttgacatatttttataactatattacacaacacccacttgaacattttttaaatgtatttttttttcaaccactcatctcagttcattaacctttcatcatcatcatataaaagcttattaaactcgcattcttttatttctaagggcacttcattctttaaatagtattttctttctttataacccagatattcagattctatttttaccaacacaaaacattccctaatctcggcagttacaactcttcttgttgtatctcctggggttttatcttcataaaaaatatcatcatcacaagaaacactggttattaaatggccatccgctgcctcataggttaatgtcatttttctgctcatcacgtttccactctgagtcacatttatgtttttgtactttgctcttttcaaatctaaatcaaggtttagatactttgcgtttgagggaattatgttaataaacacaaagatcagtgataacatcatcttcatattgtttcgatttttttatcttgaacttatattgtaattatttgttagtttttgttatggatttctaaataaaatttgctcgcaacttagtttaggtccagttaattgtaaattaattcttaaaaaattttatattatatctattctatttttgtaaatctaatttaattttggacaaatatagatgacattaattgttagatccttttagtctgaatctgactcagcattagggtaatacaacctaaactccgacagtccactggggcctgcatccattagatcttgttcactaatattcggattattcaaaatttggtccacttcttttctaatctgccttggcgatatatttcgaccctttactaggtagggcacatcatccacttgatccagatcttcatagctcattaaccttatcggttttcttttcataatgttcctgataattcttatggtatcctctgcattttcatattgtaaactcacataaagttcttgatcccctatggctcttataagatcatcagtgatggcgaaaattttttcaaccttttcatagtattcatctgcttgccaaattaatatataaatacataatataacttgtgtttttaattccatattagttacaactcttctaaatttaacgccagaagttgattctttattgttttcaccacttgattcatgaagttggttgccatcaatcgattctttttttatattagtttcatcaattgattctttttttatattagtttgagtatcattttgataggattgattattttgactagtaccaacaagttgactaatcccatcttcaaactctccatcactactactatcatcacttctatcactgggatagccataattcaggtaactataataactttcatcaaactcagaaaaattagaaaatatcaagaccccgtgataatatacttccctgataacgtcttcatctttagcttcatagaaggttactccataacattggctttcgttatcttgttcatcaaaatcttgtacgtacaccttattaactgtaaaaaattttgaatcttcgtttaaaaggggtaaacgtaactcaatacaacttccaagagtaaagaatagactaacaattaacaaaactttcatttctaacattaaaataaaattctagttattgaaataattattgttattaaaaaatttgaaatattgttcaattcgcattattaaatagctagctaacgattcttattcaccggctttaattttattataagaagtatttattttttataaaatatataataatgtgcaaaattaatattaggttaattattatcaaagtaatagataatagtatcgtcatctgaatctgaatcagcattagtccaatccatcacatctgattcaacaactgtagagagtccactaggatcggcctctcttaaatctgcttcaccaatatttggatttttcataattttttctatttcccttttgatttgttttggcgatatatttttattacccctaagtaagtatggctcaccgtcaacttcatccagatcaccgtagtcctttaactttgaaggctctcttgttaaaatgtttttaataactcttacttcaagtggcatatattcatcacttcctaaactcatatattgatgctgaatatccataatggattgtattgtctcatcaactaaagtataaattttttccattgtttttcttgtttgatttcctgttttgacctggttataaatacacaggaacatctttccacttaattgacccaaactaacagttcttacaaaagcaaaatgttcaccatcaatagtaaagctattataatttggaatattggaatatatctctacaccgtgataatataccttgtgaatgcagacatctgttttactttgataatacgttaccggaaacctcacgtttcgtaattgttcatcgagttctccagtgttaggatcgacaagatcagcgccctgcatatatctctttttaactgtaaaaaattttgaatcttcgtttgagagtggtaaacgtaacacaacacaacttccaagagtaaggaataaacttaataataatattgaattcatttttaattttattagaataccgatttaatattataaataatatcttatgaatgctattatttattcattttcgaatctacgaattaggcagcaatgttgctgctgctcttcttttataactaaaataaataatatatataaggtaaaattatattataagttaatctgaatcagaatcttcactaatttcattcagttttagttttcttcttaacatagatgagagtccactaggacctgcctctctcagatctgcttcactaatatctgctttattagtatctgtatcttttgtttgtggtttaccaatatctggattcttcaaaatttcatctacttcttttctaatttgttcctcatttatgtactttcctttcagcaaaaatggttcatcgtcaacttcatccagatcaccatagctctttacctttgcaggttctcttgttaaaatgttcctgattattttagcactatttgaaacattctcttcatattttattctcatatagtgatcttgattttccataataaaatctaccacctcatcgtcatattcgtataatctatcaacctttttaattgtccgttgaccttcccattttacgcttacaacacttataaacataattatacgtactttcgcaacgactactaatcttctaaatttacgataatgttctggttcaatgagaatgtcatctcgttgttcttcagataactcattttcatcacctggaggatttcgactaaaaatttggtcgaacaaatctgcaaattgttgattatatgccactcctggaatagatgattcagcgggatatatttccacatcatggtaatataccttatcgataaaatcattttcatctttactttcataagaaattaaattacaatctcctaatacaatattaattaaataaaattaatacctagtagagatttatttttaactataaaatcctctgaatcttcgtttaaaaggggtaaacgtaatactacacaatttacggaaaataagtatagactaacaattaacaatactttcatttctaacattatcaaaataatattctaattattaaaataattactactgttattaataaattttatgaatgcagttagctaattataaatatttctgaatttttaattattttttttattacgaaaataaacaatatatatggtataaattatattataagttaataggaatcagtatcttcactaatttcattcagttttagttttcttcttaacatagatgagagtccactaggacctgcctctctcaaatctgcttcactgattccaggcttgttgataacttgttctacttctttctcgatttgttcttcatttatgtcgacaccttttcctaactgtgaatcatcatccacttcatctagttcaccatagctctttacctttgtagggtcccttttgagtatattccttattattttggaactatttggtatattttcttcatattttattctcatatagcgatcttgggcttccataataacatctaccacgtcattgtcgtatttataaaatctatcaacctttttaattgcctgctgaccatcccatgttacgtttacaacacatataaacacattttctgagattttcccaacgactactaatcttctaaatttacgttggtaattgggatgaacacgaatgttatttcgttgttcttcagtaaataactcagtgaaattatcaatttgaacttgattcaagatggcactaataaaaacattcaattcatgattatatccaactccaagaacagacaagtcagccggatatatttctacaccatggtaatatactttgtcgataacatcattttcatttatactttcgtaaaaaattagattgaattgtcctaatacaatattaattaaataaaaccaataccgcgaacatatctccttttaactgtaaaaaattttgaatcttcgtttaggagtggtaaacgtaacacaacacaacttccaagagtaaggaataaacttaataataatattgaattcatttttaattttattaggataccgatttaatattataaataatatcttgagttattatctattcatcataaattcactattctagcagcaatgttgctcctgctcttcgttcagttaaattacacttatgatatgttacatatactactatagtatatataacatgtataattaattatttttattaatcatctgaatcagaatcttcactagtttcattcagttttagttttcttcttaacatagatgagagtccactaggacctgcctctctcagatctgcttcactaatatctgctttattagtatctgtatcttttgtttctggtttaccaatatctggattcttcaaaatttcatctacttcttttctaatttcttcctcatttatgtactttcctttcagcaaaaatggttcatcgtcaacttcatccagatcaccatagctctttacctttgcaggctctcttgttaaaatgttcctgattattttagcactatttgaaacattctcttcatattgcaaactcatataaaattgttgattttccataatgtaatttattattatgttttcatacatgtacaatctatcaacctttttaattgtccgttgaccttcccattttatgtttaaaacacatataatcacgcaatctaagatttttccaacggctactaatcttctaaatttacgatagtattcgggtaggatacgaatgttatttcgttgttcttcagataactcattaacatcaggaatattttgatttaaaaattggtcgacgaaatcgccaaattgttgattatatgccactcctggaatagatgattcagcaggatatatttccacatcatggtaatataccttatcgataaaatcattttcatctttactttcataaaaaattaaatcacaatttcctaatcaaatattaaataaataaaacgaatacttagtaacacttgcgctctggctgtaaaaaatattgaatccttttctgaaaggggtaaacgtaatactacacaatttacggaaaataagtatagactaacaattaacaatactttcatttctaacattatcaaaataatattctaattattaaaataattactactgttattaataaattttatgaatgcagttagctaattataaatatttctgaatttttaattattttttttattacgaatataaacaatatatatggtataaattatattataagttaatctgaatcagtatcagtagaatccatcacatattgctcaaccactgtactgagtccactaggacctgcctctctcagatctgcttcactaatatctgctttatcagtatctgtatcttttgtttgtggtttaacaatatctggattcttcaaaatttcatctacttcttttctaatttgttcctcatttatatcctttcccttaactaggtgtggttcatcgtcaacttcatccagatcaccatagctctttacctttgcaggctctcttgttaaaatgtttctaatcattctagatacaattgactgatcgtttccacttaaaatgtttgtcaacctctcagaatcttctatgctgtgaataatggtttcgtggcgaatgtaaaacactccctcgtatgtagttgtatccatttttgaagtcacaatgagaattaaaaagttcctgcaatttatgcttaataatcttctcctgaaattaacaggacgttcggttctgtcttggaaaattgtaacaccgtggtacacaattttcctaatcaattctccatttctcggttcgtatgataaaagtttgagcaataagtctcccgcaggataatcaggttgatttattaaggtttgaacttttacgttaaacttctcagaatcttttcctgataatggaataactaaatcaatcgagcacgaatgagtcaaaaataataacaggagcagaaatttcataactcgacaataataattttaaaattttacaataatttaataatattttatagtaaatagataaaacgtataaaacgcgtatataaaattaatgaacacatgggccttttaatgtggtaattctctttaaatgtaaaagttggctaaatttgaatcaattcgacttttgaatcgatgacaatttacagtaatatttgcgatttttgaaactcttttaaatttcagaatttcacaattactttgaaactaacagaattaacaaaatactttacaggctgactgcatttaagatacgttttaaactttaaactaaacattgttgtggataatggtaaaaattttaagtggcgataagggtgtagattaaagtttaagatttgcttgaagatttagtttcatggaaagtgaatccttaggatcaattttcgtaaattggctcatttcttcattttcagattcattcatttcgtcctctccttccaaatttcctctcaactgatactcatcatctctatcctccgatatgcgaggaagcctcgaagttacagaagtgaatgtgtcttcttggtcttcgctaataattccgtccatactgccaattccagatcctgacaaaacctcatctgatgtatcagatgtaacatctgtagattgttctgatgaggtatcagttgtggaatcagtatcttcatcaataatccttctggggaagaagagtctgaagattttcctgattgtcatgactgggaaagttgcgagaataccatgagtaaatcttctttctaaaaatatataaatatcatcctctttaactgcatttgatctagcatcaactcgaattgagtgaggcacgttgtgggaaaggtcgtacatacaaccgtgatctatataataataggcttcataattctcaaaactgggtggcttgtcacccactgagggaagaatagaaatgacgaccctactacccataatggtataatttacaatgcgcctaaaatcgggttccctctcatcctgatcatggaaaatttccactccgtggtaaaaaacccgtcggatcacatcatctgttttactctcatatttaacatatacatgggtcacatgagcagcataaaatactgaatggttgtaattaatattctggtatacgtgaaagctgtccttatcgaaatttttagagggtaaaaaaagttccaaacacaccgaaggtaatacgaaaatggtcaagattagcagggaatccatttaaaggcaaatcagaaaaaatttcctaataatttgatccttcttgggtactcgtgttgggaactcttacaattgaattttattacactttttgggttttatttgaaaactgcattttaaacccttttaataattttttacctctagattctttcgttttaaattgattttacacccaatttatattatttcataccattaatacacttcatattattaatactgttgatacttctttgtttaaatattcaacttcaaaattatatacgttattttaaaatatattttacatataaaatttatactataattcgtagataaggataatttcagaggagtttcttatgccttctctgtttctatagttatcagtcaattactaaatacattaactattttaattaatttttatattttaatttaattttataacttattttacaagttttagaaataattgttagaattttcaaatgaatgtatgaaaatttcaaaggcactacacattaattttataactttaaactccattattttattttattttttgtaaaatagttttttaaaaatattctaacagtcaatactctcattttgtggatccatatattctcatgaatgtctttcacttgttacacatttagtccattttaaacagacttttgacaatttttataatatttaattttgaaattatcattcatttaacgtttctattttaatgtttcaattttaagatgttaagtcccttggttaacctgagattatcagacctaactgggaggtattctttaacgaaattttcattaattttataattttagggctgacattaacgatgattatactgacatgcttcttgtgctcagaaaacctgataatttcttcaaagtacctattcataaatttattaattcctctattttatcattttattttagtcgtaaatgaattgcttactaatcataaaatttaggacacttcttacgactctgacgttgtcataaatgtccatagtggtgttctgagggttgcctcatcttattttaacgaggcaatagactctctacttgaaaagaaatctaaatctaacggtaactaatccaaacttaatagtatactatatttatacactctaaatataaaaagttgtcgaatttgataatattttttagatgatttgagtaagaatgggcctttacagttagttgtcgatactgaatatccggcagtggtcaagcgtataatatactacatttacaagtaacctgatttttggcctaatttgcataggaatgattaccagagcatgaatgaagaccctagttccctgattccattatatgtagaaagtgctcggtttaaccttgtagagctcaaaaacagtgttgttaagttgataaggtcccaggcatctcttgaagaccttgcaaatctagcctcagcggctgaggtagctgaggagtttgagcttgcacaagaatgcgggagaatacttgcagattcatcatacgccgttttttcaagtatttttttaatcacacatgtaattgttcaggcgatttgtatttgagacttggattttctgctttgaaaacgctgttgcagagtgataacgttcagttggatgaggttcaagttttcgtctcactatgccactatttggacagtaaaaagaacctaaactcgccttacagttcttcacaaataggaccaaaagaaaaggtacaccaaacaatttctctatacaaaactactgtattgatatttatctgtagtataaatgggtataggaactaataaagcatgtaaggttctgctcaatgtcacccaagtctctgtccgagtttagaagagaatcagtaaacacctttttactggatgcttcattgaggattttaaataaaacccagatgaagcccagagtttttccatggatggtaagtcatttctcacatctatataccaaaattttatatacaactgggtacaaattattattaggaaaacgcagagtataagactatttgttacaacgggttatttcccatcatgctggtcagatctggaaagtttaaactatcgaacctggatcacgactcaagtaactgcagattagtaacaccgagacttgataccaaggatcaaaatgattcttacccagctcacacccatggtactcaatattccacacatatcatatacaataaatataaatataaatataaatataaatatgttattaggagttgaaagagagggttgtgagttgttttgggcttttaaagtgtctagaacatctagtggcaggataggtcttggactaactattaactccgataaaccattggatgaactttctaggggaatattctcaaaaatgcccaaatcgcggaaagtcgcattcttctacgatttcagccaaaacaagttcaaatctggctacatcgatgacacctcagtgtaaaaccatactatcattacatatatatatttatattagtgggataaatattgattagtttggacataaagaatttgtggacctacgaatctaatatgaacagagctgtctataagttaaagaccaacgatgtggtttacatcagagtacatgttacattcacctgcgtcaactttacaatctcagtggcaaacaccaactttaatgaaaagttcaccataccagttggctcaaaagtattttccatttacaattttttatccataccattatatacagcagtataataatgttaattgtgttttagaggatgattggaaattcaattagacgtcctggtatattaacatcaccatttattgtaacatacgatgtcggagactcactcttattacctgaacttacttctaaactcattatagcataatctaatactctattgtgtatattatactagtaagatatttaacaaagttctctcaaggtctcttcccagttcagctgctgattatagttaaatatgatgtattcattgacattggaacttgaattcagaactttaatgtaatcgtttacgttttcaaatttgttcaccttttcatgttgattttcaaccgagtcattagaagcatttacataaggagtagaattgacttgttcgaaagggttcaaaatagattctttccctaaaaaatttaattatatactaatatttacctaaattgtccagtaattgatcatttggttggtttttgtaagagtataaatctgacttagggtaaaaaacagtttctaaaaattaataattaagttttaattaccagaatcaggaattgaatctgctgagttcactgataaatttgactgaaggaagtagttcacagattccaaaatgttatttttatccaaattttggtaatttccaggacttccaaaagagttcactaatttgaaatagtcggaaatgggattagaccgatttttaaggctacgaacagaagattcatcatcagggttgaggctattgatgtgatcacgaagtcgtttaataaaaagattctttgcgatatcagaatcattggaatcaaattcagaaactgcctgcaaaacaccaagtaatagctcaaaaagtggaggattttcatccctaactctccgaatttgctcctcagcctcagcagaattaatgtattccttatcagctgactctaggaattcataacagtacataatatttctaagtacagtttcatccaagtcagattttcccatctgtaaactctgatctaagccagacaagttgaccttttcagagtgatccataggggcggttttacacctctgaaaatcatttgatacaagctcagttccataagggttcaaattaaaagaagaatactcctttccctgccaattagtatccattcaaccaagacattaaattaaaatgaaatgaacggagggaatgcataacgttgcactcaacattaaaaataaacattcaagtccaaataatttaaaatatttaaaaacttaaaattaatggcaattatggtataaaaaaactaatgtgtgccgaataatctgtaagaatgaatattcctcatatttatcacaactgtacattcatatcactaaatataatgtattgaatattatatattggtctatttctaacatttttagtatctttattttttaacttaattttatcaactttgaggctagatttatgtccacgaacttggtgatttatcttccttccaggcccaccgaatgttttcagttatcttcagaatctttgaaagttttaggctttaactccgaggatctcctttacaaacactattgcagtccagaagaccaatgcagaggttcatacccctgcttcaaaagtgatattttcaatcatgtcgtgagcaaattgtacaacgttaatctggagaagttttacctcctaataaatggaaaactaactgataaaaaagaacataataaaaatttaaatttaaaccaccgttctacccctaaggatttaataaatgtaacagttctatacaagcttctgggaggaaagggaggctttgggaaaatcctcaagacgcagtcaaacaagaaaagacagtcaaataaccttgactcatgccgtaatttacagggccagaggatacgaactgtaaggctttccgaccagatgaataagtggaaggagtcggaatcggttcgtgaaaaactgggcgatgatgtatacaaattaccaaaaaaagacaaaccttctgaaaatattaaacctgaaaaattttgtgacccgaagtacgtagaaacagttaagaaggaggtttccaaggtcaaggaaactgttctcagaggattcgacaggaaacttgaaaaggaatctcaagactttaaattatgtgaagaattagaatcaaagcgatctacactaattgattcgtgttcgaatatttacgatttatagaaggttgatagttcctctttcaacccgctgcacttctttaaattattttttgttaatgtaatttacttttttgtagatttattttctatttattcagataatcgcatctttaaatgttattcaacacacttaagtataacttcgactgggaatccgttacggtatgttttaccaatttcgcaccgattattcctttttagtgcgggttctggcgtaaatctcccagcaaatacctcccttatattaacaatgtctataccatcagtgcaaccgttcacccagaccaaaaatgtttaaaggtccacaggatgtaccacgtcaagttcaacttcccatacttgataagtaagtcgagtattttttactgattttaacttttatttagagaaagtcatcgggaataaccaagagtactaccttcttgaggaatccatcgtcgacttggataaacggaaattatcctacaacatagaaggattctcaccagactactacatgtaactcattatacactgttataattacacttattataacaccaataccattataataaactatattataataataattacatagtgtttatttatattatgaacataactatcgcataatgattgcacataatgttagttatgtgtaatttattcataggtattctgaatccgcttctttcgaagagtcttcaaatccgggcgtcactgacttttcatcatcaatagatattaagattagaggcttcggaattatgaaccttccgcttgaaaaggtaattccccttaactagttttaccatatccgctagaacggttcctaatccgttgacctgtttttttatttttaaggtaattatttttttagttttgtaaaaacgctattttcgagtcaatatcgagatctaacgatttcaacgcgatggtagaaagcatatcatcatgtctatcagagtctcacgttaaaacctaattcacttacttgtaaagaattgtaatttgttagttgaatttttggtaaaagttctttagcatcagccttaagtcattagttttattttcattcatagaaattgatttcttaacatagtctgttaggtacttatcagcatctcttcccttgtacctgctgtccaacaggacaactccagaaaagtcatctctatgtctcattgctcttccaatacactggtttacggtcttgtagcacaacagtgtcctctgttccctcgcaagctttgaatagttttcagatactgattgctcaccggcttcagatgctacatttaattaatttatactatagtatcgggatactatggctaatactaggagtattatctgtatatattatagtatctaattagcatattattatagtattagttgattgttaatagttagggatagtatagtatatatagtaataatatatatatagtaatatactaatagtgatagtatgggtattagcagtggacttacactttttgttgtagtattcacgttttagttttagtttaatgttgtctggggggtatggtaggcctaccaggagaacgagtctggccaaatcatcggaaaaatcaacaccttcactctgacttcctccgaaaaccgcgaatagtatggcacccttctcggcacagcattcgctgtactcaggaaatatattcacattctctacaaataattaatactatggttaatactttgttccttgaagacgtgtttcctcagcaggaccttgttgcttgaacttgacttgaggaagaacttgtaaaagacatcaaggtacgcgtaacttgagaagaagcaaacgattccacctggtacaatttcggtgatgatttccattagagtacataaatacttcagttccttcaagttctcccttctcgagtagtcgaaaaccaactcatcaccattctcgtctgaataaatgtgtaaaatatttggaacacacctttatgaattactgcggataacagccggtctagaggaaacactggtaggcttctatggataaaaacctcagcccttgacggagcgagtgataagaattcctcaataggagaaagagtaccactcatgacaatcactgacctagattcaccaactaaaaattaaaattaaatcagctttttaccgattttgtggaaaaattcctctaaacaatcattaaacaatgtaattagtggtaaatagtgagttggagtaaaaaatacctgaagccacgggaaagatttctattgaaatatcttcggattttgtaatgataacctcgtcattggaaccgcagtagagtaaagagtgcacgaagttcttcaggttatagaccattgacgtgtatgaggctatggtttcgttcttcttttttctgaagtggtattcacgttcagccaagcctctcatgtgcctgcagaaatcagtcgaggagaggaagttaagtatttcatggaacttgatatcttcaagggcgtatttgactgtgaacgcggtgatcttgagactttgggaagattccggctttgaaaggttctctacaatggtgactacaaatttagtgatttccgaaaccctctgagtcattaactcgttaaattttggcccatacttgctcacatacataccaagttgatgcaacagctgtttaagtcctgtcaatgtgagtttggaggcgtgagactcagttaatgcgtctgtcaggttatggccctcatcaaatatgaggatgttatctttgattcttaagcccaaactctccctcaaagactcattaattactgttacgtagggggctaagacaatgtctgcgtttggtatggttgttaagtttgagtagtagggacaattacccaagtcctttcccagacgaactaagtcttccaaatcaaggggataacaagttgctatctcactaagacctgtggtatttgatctaaattcacattttgaccttctacactcgtcgttcagttcttctggtgttttacacttgctctttatttgtttgttaatacaaacttggcttctaccagtacccattgctagtcttatgttcctgtttattgtattcagctgcttaaactcctttacgtattggttcagttgtgagaaagtccggctgcaaattatgatctgggtcttgttaaggttttcaagcttattctcctaaaataaattatttattatgaatttacttcagttgtgtcagattcaggtttagttaataatctcttgtagttttctcttattctcaatttaccatctgaagtatccaggcggtcagagactttctttctgagttcttcaagctttactgcttcatcctttataacatcctctaccatcttcttcttatggttcaaagaggcctgagaaacccattccggaacttcttcatctaaacaattatacattatagtgaaaatccttgtgaaaaattaattatttaaatgttagtatcatgtgtaggaaaagtacctctagaaggctctaaaccaatatcacacatcattgtttttgatctattatttttcagcctataatattaggataaggtgttgggaagttataataataccaggtcagggctgagcataggattgacaaagtttttccagagcctgtgggagattcgaataatccgaaaagagattcatcaaaacatctgtaggcatctttcataaaaattaattggttctaaagcaaattaaaatcaaaattttggaacgaacggggtacggatcaaacggaagttcaaacttcacgtcatccttcctaggatctaatgtcatttgtaaaaactaattactagatctaaactatgagataaaaacacattataaaaacgtattttgtaatttagaatttatagacaaatgcataaatgtgtagaatttatgtttaaatgtagggaggattaaaaccattaacattttatacccaagttcatttcatgctcatttttttgttgtatttttatttttgtcgtttattttgtttaaatgtcaaactttcaccttattgtccattttttctttgtttcttagcatacaaatatttattaaatatttatctctagttttcatcgtctgaaggatttattgatctatacaatcctgatttcatattgatatattatttgtctttatttttattaaaccttaattactttgttttcagtctttgacttggtatgaattgttttcatatttccagattcttctagattttattgatcagcaatgtataactttaatccaaaggggcaacagccccgcctaagctataatatgctttattctcacttaaaattgctaggcaagtctaatttaccataatttacgaatatttaggatacacagatgaattggctggaatcgaagcgcataaatttatgaagcaggttaattctcttaaccaacaatctaaccctttaaaccaacagtctaactcttttaaccagcagtctaactcttttaaccaacagcctaacccgttaaaccaacagtctaattcttttaaccaacagcctaacgtacaagcaaatacttctcagtttaaccaaaatatgtaccgggatacaaactataatgctgctggttacaatttgaactccaacgtcttcaatcagcaagtgcaacccattcaaggcattaatccgccacaaattaagcaaagtttcaaccttggttttgaatcactaagtaatcaagcgaattatgataaaaataatttgctaagcggagtcaagatctcttcaaaggcaacacctccttttccaagcctacaactgaatgacccgttagaccctcacaaaactcgcaaaagaccacctctaggtatttttaatactaacagatgtgtttagaccctagaaccctggctgaaatatttaatactgagtcagtacaacctctacaatgtgaccctgcacatccaattactctactgtatcagaaacaaaaccctccatctaatccattcctaattggccatgaccttcccactgaatctcctctggtgaaatccgtaccaggatattcactgaatcaaccaccaccaccaagttacccctataaacagccagttggaacagtcccgcagccaaatgtcaggtgctccggaattatgcctcaaaatccaccaaaaatgccgagtcccttttcccttgataacaaattgcttacgccaaataaaaataatgaaatgccgagccctttttgcctcgataacagaggggctccaaataaaataccgagtcctttttaccttgataacaaagggactccaaatcaaaataaacaaaatgaaatgccgagtcctttttaccttgataccaaagggactacgccaaatcaaaataaacaaaatgaagacacggcttcattaaccatagtccaagtcaacaggtggattcaggacctgtacttgcacttgaacatggtaattctttaattttcatataattctcagaccacttgctctaaaactttaagaaaggcagtgaatatttatattcaacacgtaatggaaaaattcaggtaacttattgagtaaaattgacttaatttttaggaatggaacgttgactatgaacgagttgaaaatgttaagtccagacgaaatattgaacttcaaacccacaaatgtagaccagccacgtgaaacaatgaatttcaaatcaaaaaatgtagaacctcgtgaaacaatgaatttcaaatccacaaatgtagaaccacgtgaaacaatgaacttcaaatccaaaaacgtggaaaagccgcgtgaaattcagcatctgaatccaaagcaggatttaaatactgagtttgaaactaaaaatgtaatacacccgccgcagaataggtttaaacctaagtctaataaggcgccaaacatgtacagagctttacaaaaccaaattaacgattacttatcagttccagtggataaaaatgaaattcatagacgagaacagagatcacatcgtttcaaaaataccaatacaaaaccagtaccctaaactatacatatacacgtatatttttgtcatttaaactataattttcactgtatctaattattcaacctggttattttggattagacttacaatttcaatcctgtcaagggtaaaaaaatagttggtctcaaccaagacatagagaagccgtatttaagacttacatcagcgccaaatcccttaattgtaggttctatagtaacataaaattaccgtaggtcaggcctgagcaagtgttggttaagtcattcaaacacgtgtttgacaaattcatgaggaccagaaattacacctatatccaagagcagtttagatcaatacgacaggatatacaagtacagcacctgaaatcgccattcgtagttagaatgtacacaacaaatgcaagattggcaatgctccacaacgacctggaccagttcaaccagtgccaaacccaactcaagcacttgcttgtaaattccaatgattgtcaacaactacaggttttcacacacatttattacatttatcacatttattacatttattacatttattacatttattacatttattacattattttacattattttacattattttacattattttacattattttacattatattacattatattacatttattacacttattacactatttttcatatttagagagtggataaatttatttatgattttaatttataatttttagtttgaattcgagatgtattacatgctgtacctggcgttacagaatatgagcatgggtcttatcagatacttaagttagttttacttaattaaatgtttattagaggaaaatcacgtgaatcaaactttgcaatctaaccctaagcttgaaaaccagtttaagaagacaatttacttcaagttcgcaaatgaggtcagagtctcaatctcggaggggaactttatcaaatacttcaaactggcaaataccaagaaaatcgaccactcgtactatctgcacaggatatacaaagacgcgtttgataccagaaaaccaagggatattaaacagaaacacaagaatttctacgatacagactcaatgttttacgtcaaactgcttttcaaaatgttcgaaaacaaacttcgcatgttctcactctacacactttgcaggtacttcatagctcagcataatagtcaattatttgaccactctacaattaattaactattttttacaattaattaactatttattacaattatttgactactttttacaattatttgactactttttacaattaattaactatttattacaattatttaactaccaaatacaactattctggtgtgttaatatattttgataggagttctctgaccttgtcgatagaactgttgacggatatattgaacttttcaagcgaggatgattgcctcaactttctaaagtaagtttttgtcctttaatagtgaaatttagaagaaacaagattaccttcagtagctcgaaattggttgattgcaagcgatctctggattcaattgctaactcgccactcatgcgcagtaaaaagacttaatttgctccataattttatgagtattcaagagtttcagttctccctatagtaatctattagttgatttagcattttagagagaattacctgaaaattggaattcatgagtgattattacatacgaaaatgtgaaagatggaataaaattattaaaaatagttttaaactgcataagtaatgaatatacgtgtgaaaatagtagtttatattaaatgagcgattttaaactatggtttcgttgagtctctgagatattagctggagtttgttctggatcaggttaatggtgacgttgttttgaaaacacttaaaggtagagtttatattcacgttttgtatgccagaatcggtggttatgttctttattttttccctgagattttcaagagcctctaaacttgaggttctggaaacacggtcagtaacccatttagtagtaggattaaaattagtttcgttcctcaaagttgaagaatcattggggttaacatcacttaaattcacttgagttatggcgtcgcttatggtataatttgattgcgaatttacaactaaaacatcgtttacagatgctaaacggtcaattgaatcttgaccatttggagttaaaattaagtctacactattaggatttgatataatagtgtcatgattagttaatatgctatccaaagaatttggagaattcggatcagagtgatttaggttaaaagtttctgaaagttggtagaaaggaaagccctcttcaatatccttgtttaaatgggattttggagctagtttagtcaaataactggaaggctgagttacagttgagactgaatttgtaggtgaatttttagtatcaccagtgttagggctgaataaaccagaatcagaatcgaaactaagacgagaatttgtgtctgtaaagttggcatttgttgcagtgcttgtgttagtagtcgtggcttctccactatgactacggaaaattgttctgttccttaacctgtcattaatctcaatcaatgagtaattttgtgatttatatacagagttattttccattagtctcttattttcaatcttaagtttttgtagagaagcgctttcatttttatacaactctttcattgtagctatttcactctttagaatctcgttcatcttgtgggattcctgcaaattgtctctaaagtagtctaaatcagcctccagtttagatattctaccagaaagctcattcttcttaaccttcaactcctcaatctcgttcttgtacatgttctgcataatctcctgagaagacactagagatttattttctttagttaagagatttaggcggttttgcagatcaactttatcctttaaaaggtgttcattttgtttcctttccactattaagtcagactgcagatcctcaaccttaatttggagtgatttaatcctttctaatttctgttcattttcagtcttcagttcctcaagctcagatgataatttttcctgcttagataataaattttcattctcggcgattagtttttcattttcttgcatagctaacagggcttcatttttagcattgttattggattttacaagacttagcttaatatccgttatgtcatctctctgaatagtgagaatatcatctatcctcttgtatctttccaaaacttcttcatctaatttaatcttagattcttcttcagtcagtaaagagaattttttaggcttaggagtaccataaatatttatggattttaacttattacgtccactgcttctaaaagaggaactactataaaatgtactatagggttcagaaattattttcttcttaatcattcgttgtctttcccttaaaactcggtctgagaaggttaaactaatattactttccctatcactatcgtggtatttataatcataagaatttgactgagtatatttattgatcaaagtgctggagttagaaattgatgactcactgtgggagtcacacactgtactggtaaaatcattatcatcagagtctataacgtctaatttatcaaatatatttgcacatctggttatactgccttcctcaggtgataaaacatcaccagagtttgaaattggaagttcgatacttttagaactttctgaacttatttctttaaaattatcattaaaggttggaattcttaaataatcagacatctcagaaggagagttgtacaacaaatcctcatcttccttcatagttatcaattgttttctcgaaattatcacgtttcttaaaattttaaaatattaaaattaaagttaatattacataaaaactgaaagaacaataacctttaaaggcgtaaataatgtacaacgattacagtaaacactgaaacaagctattttacaaaagtttcacaaattaaaacaatatcaattgttctaattaagaattttgaattttggtgtaaatgtgtaataatacgggtgaattttgcatgcattttcataccacacaaattacagagaagaagggtaaaaaggtctactatacctttaatttagggccaaaatgtcataaaacataatgataaaatttaaaaattagtattaatttacacattcacaattttcagttgtttctgcccaagttacacataattaacataagacatgattcttataaaaaacaatcataaataacttgaaaattaaaagtataataaattaattgaaaaattattcttcaaattatggctaaaattttgatattaagaccgttggtttgaaagagtattcctgaacttgatcaggcgtttaagtatgtttaccaaggaattaggattaactcctagtaaacataaatttaccagtattcttagcaagtttctgtcaattccagtgtccaaataatcagacaatttgcatattaagtcaaagttggtatcttctacagtgttattcttcccaattttaatcctctttactgtattatcttcattacccttaaaaataatagaattatccatttattattaaatttaaactaaactatcgagtgcacagttgtgcatcaaggccagggagaaaaataccacatcattgtctaggagtcttaattatacgatttttaacccagaattaacgttatattaattctgatgaaaaaattttaaatattttatgattcaatttactcatcgcttatggtgttacacccttaaaacttctctatctaatctatcaatgatttgtactttaaatgttaaaattagctcatgtattatataattttaaatgtattttttgccaaaaataggcagtaaaatttaatctcttgatttaacaaatttgtacagtatcggttctataaatatgggatcttcggttgaagatcttacacttgaaaactccttgaatgaatttatcaaggcgaattcaaatgataaattttttgtggatgttgaaaacccttcttgtaaactggtttccgccagtcctaaggccgattcacctcaaagtaacacatcccctaagggagccagattacgcaaggatatcagtgaattattaaatgaagtttcacagctgtcaaaaaacttaaatgtttccgaggtttcaagatctttagtggcggatctaactcaaaagccaagctcacctagatcatccggcagatcttcaaatggagactacagtaaaaatttagttgaacacgctcaagctgtgatagaataccagcgtgaacgtatagacatacttgaaaacatcatatccaagttcaactcagccatggacaaggtgaacgaactgcacaaagatgagctggaaagatccgaaattgagaataaaaacatcagacttcagatccacaaagtggtctcagattacgacgcacttattaaaaagaaagattccgaaattcgtgaaattgaagccttaaaggagaagaatcacaaaaccgactctgagctccttaagaaggatgagcaaataaaggaaatgtcaaaaaagcttgaaaccctgcctcaggaaatagaaagagtaaaaaatcaaagggatgagcttctagaccaagttagagaattaaaaaatgagttaaatccaccttacaaatcatggcaaaggagcatagaagactcacaatcagtcaatgaacatactggatcttcaccttttacctttgaataccagacggaatttggctttaattacagagaatcaacgtctaaaccgtttgctcattttttatgtgatataaggaagcaggagactgccgccatgggcaggtgcctaatgcaggtagaaaatgatctaacaagttataaaaggttacatgaagagcaaagatctgagattaatagacttaattatcttctaagtgttaaggcaaaaactgaagcgtttgatgagaatccatacttcggatcccacaaacagcttctgtacatgcggaacttatttgtggaaatggttaaaaaatctaatgaacttacggagaaaattacgcaaaagaaggaagaaactgttgagagggaagacagatcagttcaggctgcgtttatggtaaaatcatttggagagcagagggaaatgtacgacaaactccttgcggcagtcaagaacaagatctctgtggaatcttcagggacttgtttctacagatgtaaattagattactgtaaactgtcagaggtggaacaaatgaatttggatttaaagtttaataaaatgttcgccgaggttgaaaactcgatggttcttgtccatcagctggaagatgaccagatcatacacacgcagacaatttctagagagagtctaaaagccgttagaagtgaccctaaaaacttgcaaatcatgttaaaagacgatcattatcatgtgttcagactaggtgacttagactcttacaagaggtttaagtatggtttaatgtacgcaggtttcctcctagatgagactaaactgtcaattttctcaaagattgacctgtctgatcagaacactttggaaaatctacccaaggatatggtcccggtactattttcaaaggtcgtatctctgggcactcagaaccccaattacatccaaagtccaccaaattattcatcaaattacccaccaaattgttcaccaaattattcaccaacttactcaccaaattacccaccgacttactcgccaaattactcaccaaattactcaccaaattactcgccaaatagccttgagcaaagatattatcagtcgagtttagactttcttgtcaataacatgtttgacagtgtgagtattttatcagatttcagtgaaaaactggcatactatgacatgtcttgcaatgtgctagtcttgtacgggcctaacttggccaacaatcccaaactaatccatcccaaaaacacttacaaattcctggtcaaaaacgatttagacaattcatctggcttaaatcaagctcaatctatagatgaatttattgaggaatataaagtaccaacggcaacattcccaaatggagaacatgtgatacattactttaaccctcagcttaacaattattccctagtatcagttaaacaaaggagtgaactacttggaccaattcacagcggatatcaaaattctgaacctcttgctgttttaaatagttctaatgttccaggtacttctccaacccccgttaacagaagtttcatgaacatgaataatccagactttgaagtgtattttatactcccactaagtccaaaatataacgacacactcactaagctaatgaacagaatagaattcctaaggctgaaatcaacatttagtaagcttggtgagcataaaatagaaatcaaggagaaaaagaagttttacaagtttacagacggcgttttggagatgaagatgggaccgagctcggacggaccagtgagaattccttgttctgacggccaatatgaatttgacgatgtgaagtcggaggtgactttactttccaattcagactcgggatgcatggagtcatttaaatttaacattcccgacttcgcaatgtataaagaattcgtttccgagcttaagaagaatggtctaacgcctttaaatccaggtgctgaagtcggaagagggcaattctgcctagtcaccagaggcctaattacgatatttaataagaatatttcaccagatccaatcctcgtcttcaacgtcaaagacaccaaagttgaagttgaggacaagcctagaaatataaaaattgttaactacgagactgggacttgtgttgacatgaagtgtctgaagaagggagtgtaccctaggtggattttcgccttaaaatttgctggattcctcgaggatgggcaaagctctgatgaagatactacactgaacgagtttttattcgagattcatattttcgactacgattccaagggtgagaaggcttttaaatttgaaaatgacaccattaaactctatgccagtcctcacagccagtcacaggaatctaaacctttacgtccactgtatgtctggaatagggaaaatattaacattgagcccagggccaaaaactccagtgtcagaatctacgtgaacaaagggaagaaaacccaggaatttttcgaaattcggttcattccaccggcttacgatgatttcatgagtgaactcaagaagaataattataaaattgaccatccagataagctaaagagtacaaatcaccagtacgttgttagtcttaaggaggttatacaactacgccagtcaatggatagtcccaacatcatgttaaagatacaaaaacagttttacgaatgttctgttgatatcgacggcatgaaggtaaactttagtccaactgtgaattacaaaacgcctattgaacttccctttaaaaagcaggacacattccttaaattcttacttgctcttaagatttcaacgtttttacccttcacaaagagaggcacagacataccaatcaacttcttacctgaaatcacatactgtttcgcctgcccagaggccaggagattattcaaaaactgcagacaataaattttaacttttcaacacattttaatttcattatatatagtatttatggattaggtgtgtcaattgtggagattgggaataaacaataaaataaaataaaataaaaagttgatgagtgaaaatttgaatttttaggtcattttataacatttggaaaattaatttataattagtattctggtgtatgtggtattagatattacattttataataatttccatatattatattctaaatgtcagatcacgtaaatttatactgttaaaatattatatcttaaaattaggattaatagaaatgtataacggtacgggagctccaattaaatgtaagttcctcaaccaaattatttgctaaaattagcttaaactaaccataatctttaaatattttatagcaattgagggctgggttttaatggtaactggaatccatgaggaagctcaggacgaggatgtgagagaggcgtttgaaaactacggaaccgttactaatctacatttgaacctggatagaagaacgggatacgtcaaaggctacgccttgttagaatttaagaataaagaagaagctgaaaatgccatggccagtgagtaaaatttttaattatttaatgtaaatttagaattaaatggatcagagctcctagggaaaaaaatttcagtaacttgggtatttagagaaactcctcaagaataaataaatttgggattacgcaattaagattcctaacatttagagaggaaacttactgtaccagttctcaaataaataaaaaattcaaatgaattatactatataagtttaatataatataatttatagtatattttattatattaaagaaatattaagggtgtaaattaattcgttattccggagaattgtgaaaattacgtaaatttcccgattaattcttggatataataatttttcccaattaaaaatttattaagaaacaagttaaaactgattaatgagttaatttgctggataatggtaaatttgatggggaggttgttttgtagactgggttaggttaatcagttaattataattattatgaccttttaaatgtagatataatataataacttaatgccttgtttttgtatttattatatacctccgagctttttaatacgattttaattttaacacaatttttgtatacttcagattaataccttttaatttcccaacccaatgtttaaaatattaatttttatttgattttttaatttatttattattttcaaatggtcaagccagatgaaattaataatttaacaacatcaaacctaaattctaaagatcacaaaaaagatcttcacgtttccttcaatatcgaagaatctaaccacagagaatccagttatacaggatctaaccacagagaatccagttatacaggatctaaccacagagaatccagttatctaggatccaataatactgggccaaatagtactggtccaaatagtactaatttagatttaaaacatgaagcttatgggagtccagattctccaagtgttatgtcagatgaggaaatagaatttcatcctctaaatcctttccttaaagattctaaattttaccgtaaaaagaatgaagattacgctacaaattcggaaaacgaatacgaagaatcggaagaggaggagagccagaagaggtctgaaaaatctgacctcgatcccaaatctaaaaagaagcagaaagtgttaaaacaagttgtgaaggagagttacattgacacaatggcagaggaatccgaagcatctgagctggaaagtgaagaagatgactacgatgatgaacttgataatgaaatcccagaagagctcagagatttcatcacagatgaagtcgtggaagattacgaagaagaagcaagtgatgtcgagtacgatccactcaaattcgatgaagacgacctcgaactaatcgcagaaaacaccggcaccaaattatccaaagtattcaatcactaatattaattctatcactaatattaattctatcactaaatattaattctatcactaatattaattcaataattaaatattaattcaataattaaatattaattctatcaaattatttatctaaattgttctgatacagggtaatatttattttagggcgactttgatgatgaggaggataacaagcggttgcgaaggttgaaaaagggaacaaagaagtccgagcctgaggctgaagatttgtggtatgacgaggaatcgaatcaggaatttgagctgagtgacgtttgggcaactgttgcagagtgttttggccaagttgatttggtagtacagatactaaaaaatgaacggaacccaaacaacgcaccagtggaacagtatgactcagattatgacccagacactgacccagacaatgaaccggcaaatgacgtagatgaagaattggttaacagagttgaaaccatcaaaatcacaccgtcagaacccgaaaaaaatcttgaacaagtatcacacaccatagtttacagtagttacgtaaaattatacctaatattctgtagttgatcgatattgatgagttgcaaaatgagtatttaacaaaagaggatgaggagataaggcaggtggatgagccggagcgtttgtatatacgttaccggaacaggccaaggcgtacagatgaacgtgagatacaaagtgaagcgcaatggatgacaagaagattaatgcaagaatttaacattgatttatccaaagacagtgtgaaacgaacatatgaaaagatattcagggggacttacaccaataatcacaactcagtggcaagtgatgttacagagaagtgtgaacttcttctcaactggctactcaatgaacgtttcgaagtaccattcatactataccataaaagacatttaatttgtccaccactcacagattccatcgtttggagagtttatcaactggatctcgaatgggtcagattaaacacgttgtccaaacagatccaaactaaaattggtaaaatcggacatgaaaatctttctagtgatattctctactattctaccaattttgaccacatcaatgacctaaacgacgttaacatacatcttttatatcatcacaaattggacactgatttaccacaggatactgaatcagaggatgctgaattagtagaggacaccgaattagcagaggaaacagaatcagtagaggatacagaattagcagaggaaactgaattagcagatacagacttagaggaaaagaatgaagcagttgagatgatggaggagctgcatgaggatacggaacgagttgataaggaagttgagtatcagtatgatgagattttcggtgatttcgaacccgttgataatccgacacataacagatcattaccctcaacaccaaatacgccaacccttgaccttgacgaacccgaagatattacttccgattccatatccgacacaattccctccgattccacatctgactccagatctgactcaacatctcacacaacgtctgacacaaaatctgactcaacatcggattcagttctctctggtgatgaacgggatttggatcaggtatcagaagttgagagtgaggacagtgctgatatggcaatggacaacgatgaagttgagacttcgttaatgtacgagagtaaggaattgaaaggtgacttaaaagcttcagaccaattaaatgaccgagatgaacatcaatccacagataacacgacaaactataacatgacaaattataccacgacaaactataccacgacaggtaccttaactaaccataaggatgtggacgtgaaaaagtcggtgcgaaagttggaaaagcctgttttgagagtcaagttgaagaaaaactcttcggtgtatttggtggagaatattgaaaaacttggcttggatgtgatttgcacgataataccgacggcggacgagttttacaaattgctggataagcacttgattaacacggggcacagagactttagactcacagatgtgaaggatcttgatttagactttaccgggatgaattttgacttggatattgatcagctgttttcgccattcatgacagggcctttttcaaccagtaagcacctgttcaactcaatcgttgactattattgtaccaagtatagcactcacatttctattcgaagattgtttcgagagtattttagaaactactgtagcataacttgtgtgacaacgatcaagggtgaggcgtctctggaggttacagataattcctggtttatcaagagaatgatgcgtttgccggtgaataaactgttgaaaacgttacaaacgcagtataattatccgtattacctggagaaatcagagcgacaagcatatgtgcagagaaagacaaataacctaaagttgcaagagatgtatttacacatgttaaaattacaagaaagcggtgaaattaacatattattccatccactgacaccacttgataatttataccacaagtctgaccagtacaatacgaggatcacaaatttgtacggcaccattggtaccacagtgtcagctgaccatgaaactgacaccgtaaagaatttaataaacagggaattaatattattaagtaatttttatgaaaatgaccaaaagtatattaacgggatggtaaaacagttggtgggtttatttcaaaaattcaagtccgatacggcgccagaatcagacatttcccaggaagaggattattttgtgtcaaacactttggatatgagttcagtaggtaataacttttacttcttcatgtgtaaaacgattttgacaaggttgtttcacaagtacttgatacccacgtataagaaggagattaaggaattgttgtatcacacatctacgaacacggtgttgtataatatacagttgaatttcctaaaccagctggatatgaacacgtccacaatccccgataagtttatcccagagtcagaaaagtcaccgagggaaactaaaagaggtagtaggagaagtagtattgagcggagaaactcacaattcagtgacagagacgagacggagctgactgagaatagcgacaacggctcagtaatgacactgatagcaaataacgaaggctctgacatttacatgtgcatctacggtgccacctctgtatacataacaaagtacaccagtatcctcaagtacatggtggaaaacgagtcagacaccagacacaacaacgccatgctcaataactggtacaagatcatcattgacctgattattaaacatgacgtcacagtcatgatcgtaggactaaccaatttgtactctttaaatttatactacgcactgcacagaaatgtacacaaatacaacaatgtcagacttatcaaatatagcaccaacgtttcacacttgattgtgctaaaatatataaactctaaccagtttaactccaacaagtttaactctagcgggtttaactctaacaaggtgaaaaccggttcttccattggtttgggcggttcagggatatatgaggtcatttatagcccagtctattacatattgttatccctgagcactagcagactgtataagaattatactatggaactggtagagttatgggacgagaaggataattacctcctaaagcttaattatcatcatttgcagggtatggtatccagggataaactccaggaatatatcaactacgtcctaatgctatggattaacaagtatggaatccatgttaacactttgctgagttatcataaaaagtggaatttcgctgttcagtatgggagtaacataacagtctcagagtcagactacattaacacgttcatcgactatagaaagaatatacaaacgtatctttcatttatttgtggattagggattcgaaaggctcagatgctgttgagcaggttaaggaactttgtacccactagcaggaataacatgttggaactggttggtaacttggtattccacaacatggcctcgtttataaggttcagtcactctgtagactctttggacactacaagaatacatccagtggagtccggattcatagcacagaaattgtgcaacggatccctagacgataaacttgacggagaagactcaattcatgaaattttagctaatccagccaaactagacgagctagatttagaatcgtattccgtactactgtgtcagaaacaggacatgacaaggatgtttccctatttattatttattaaacatgagctacagtttccatataacgtgagattctcagatccgtcagagacacagttgaatggcattgccaaacccctcaattccagtaacacagttggctctttagacgaatttgaaaccttttacaatgtgttaaaactggataaaaatgtgttcaaacacgggactaacgtactgtgtaaatttaactattattacaacagttccaggtataatctgacaatactgccacaccagctcaagggaaacgccaccgacatgcatcacttcaaagtggaactaaacaaagtcaacccagcctcacgacacaccaatctcaccagttcgttcactaatttaattaattaaattattctataacaatgtgtagatgaggtgttttacggacgggtgttggaggtggactttaggcctgtggtattggagaatggaatgtacaactataaagttggcatttgtttaacaaatggtaacaagagaatgctgctgaatcggttcctaaacaacttgtacgacgataatttgggagaattcctgtcacccctcgtcaagttcgatgtcaactataacaagtataataacctacaaaacgtccacaggaggaaactgcaatataaaagaattatacgacacccactctacaggatctggaaccatcaaaaagtcctaacatacctcaaacaaatcgatgtaacattcttacccttactaccttagttacacatttttacactatttatagtattttacacatttttacacacttagttacacactaacgtgtcttttttttacacactaaataagacacgttctacacacacttacacacacttagttacacactatttacacactatcgtgtcttatttcgacacttacacacacttagttacacacaaaataagacacgttctacacacacatccttacacacacttagttacacactaaataagacacgtttacacatttcacacacttacacacatagttaccatgtatttactgtataaaattttctgattgatgattaggtgccgattggcgagtgttgtatatgtccgatgaatgagttggataagttaaacttgataataaagacgtgtggtgacccgttcaactatgtgacatttgtgatttacgagaagaaccagcgtgtgccaggcgagttagggagagaattatacttacaaaatgaaaagtacacaaatctggaccaaatctcatcacagtttgtggaaatcctaaagcttaacttggaggaatgttacacacatccgaagtttaggaataaccccgacgttgccaaggtggaacgtgagttgatccaggaaagctccctgaaaccagacaacatcacctgggccatcatcccctcaatgaaaaagggatttaacaacccgctcaagttcattttaatcgtaattccgcccggatttaacctcatttcagaggttaaaagtcttcaagatccgatctacgtcacacacaaatctttcagactctggacacatgaagaaaagtcactaaaacaactaatctcctggtggaaggagtacggatactggcaccgaaacaccgaaaaaaataaattccaacaacaacgcaaatgattcttcacacaattatcattattttattatcattattttattattattatgtgtgaattatgtgtaaattatgtaaattatgtgtgaattgggataattattttaatttatgagaggatttgggagagtagttcgcgtgtttaattcaaggaagattctgaggttaactcgtgaactaaaaaagatattacacaccaataaacatttgttaaatcagtcaaaaaatacattagatgaaaaattaatttattgtggaataaataacataaatataataaccaatggcttgggaacaaagaaatcaatttattcaccaaattctttaaatgttttatcattttacttgtcaatctcaggaattgtgtatcacataaaggcgaggattaaattaaatgagaaaccctgtgaatctaaaacattttacacaccttcaaaatcgtcactaatccttctatcagcgttgtctgataaaagtgtacaaaaaatagtctacgaaaatggaattgatgtaatatttaacttttttaagtatttcggtgtagatttacaaaatgtgtacgatattaaacatttgctactgttatattctgccattgaggaacaacattcaacacacgattactcacaattaatcagagccaatttacaccagaacaaaggaactcaaactcttaactctgatgattcaaatgatagtttaaagggtttaaaagacgattttatacacattggagaccctaacggtgtagaggaagatttacgagtaatccaaaagataccttctattttagtaccatttggtagaattcacgatcttagagcttatttaggctctaaatacggaattactaatgaaacatttaccctgaggatggaaacttcatacggagaaatcaagtctaatccccggatttactcgccagtttacgaaaatcttaattccggtactctaaacccgaaaattctaaaagaaaaactcctctcaagtcttctcaatggaaatatccaattgagattactcacaaagtcagcagatttcagtggcataatactgtaccactttgaggggaacataatcttgaatataaactcgttctatgttaacgagggcgtgatattccccctgtacggcttggtaactgaggacaatatcaaatatttcagtgacaagaaaatcggtgacactgtccactgctcacacatgtaagttcttaatttacataattttatcgtaattttatcactaatttatcactaatttatcactaatttatcactaatttatcactaatttatcactaatttatcactaatttatcactaatttatcactaatttatcactaatttatcactaatttatcactaatttatcactaatttatcactaatttatcactaatttatcactaatttatcactaatttatcactaatttatcactaatttatcactaatttatcactaatttatcactaatttatcactaatttatcactaatttatcactaatttatcgtaattgtgtagagatttggagaatttaagtgttaaatttactaatgagcgggcgtgtatagagttgaaaagatataaccaggaatcactagtctacagcctaaaaagtaaaaaatacgtacaatttaaccaaattcacttttaacacataattaaacacttgtgtatggcacacttagtctatttactcatcatcgaggagctcgtcggagctccaactccagccttcatcttgattatttgacccaggaaacatttcactacctaaacaagtcatacaatttgttaatctaatgaataaaactcactgttagaatcaatgtgtgaatcgatgtgtgagtctgagcctggggaaatgagtccgaagatgcttccgatgactctctgggctagagaaatgccaataccgtagccgaacccttcccgtatcattttcacgaatccaggcgattcaggcctttgaagattctgtgacttcagcagttgcaattctctaattttagcgtcaatttcgtcatttgttaaggttccagtgatggacttagtttttctggaagaacgggaaaaatgcctggaaccagccaaatcactaaaacatttaattctaccaaatttacacaaactcataatttaaccctcaactcacatttaaacatatttttaacaaattatatatcaatataaatttatattcaataaatcatgtgttaacataaaataatatttaataaataaaataatattgtaaattgggtgacacattggattgaaattaaaattttacaaataattctttacataataaaagataatttggtaaaatgttaattaaattgaaatatgagataaaaagtgtttcaaatgtttcggggactggttatttctagtcagttaaagctgttcaaatgtagtataaaacctgtaaattccagactgtaccatagtaaatgtacgatattaaatatgtccagaaaaagggacgaatcttcgccgtactacggcggaatctcctcagattccaccgaaaaaaggaaggcacttctgtcattatccattccaactaaaaggtcacattccaacagtattaaagtcctaagcttccaggaatcacagtctcaacactccttgactagggaacctaaacttacggagtctactccatttgttaaatccgttgttccggagaacataaagaagatggtaagattatttgggaagaacccagagtttaatgcgctcatttacggagacgacaatgtgttaaattgtctcacaattaagcagcggattatgaactttcaagtcgactgggacatccaaatgcaagacaaactagcatcctgcaaatacaatctcaagactccagacggcaaagtaagaagatttgagttaatatttggtcaggtttttacaggagaaacattttctactaataagaaattagccaaaaaactagccgcaagagaaattttatccaacctcccaataccctccttcgacgtatatcatacccatattattatattattatattattatattataatattatattattataattgaattgtttaggagatgtatgagaacagccgttggatgatttcggtgcgtaagaatttactcggcgctagggaagaaattgtcgaaaaaacctttacaagtatttttaacacaattttatcaataattagacgtgtgtgtttgtaaaatcgagtggaaaattggcgatgttagttatctcggcactggagaagggcacgatttcaaggaagctgaactctacgccagtcagaatttatacctacaaacactcaacgtatttttactcagttttaaacatcctggcactactataaagttttgtagcttaaaaattcgggtaagaatttggacaggaatttgtgtaaaaatttgggtaagggaataaaatcccccgtcacggatggaaataacctcgcaactgcatccgctaaatcaacgtttgacgatgagttatcccgatctgacgccgcacaaattaataatctacgcaatattctcatctccaaaatcaaaatcaaagtacctttacccaactaatcatacccacctaatcccacacagttaatcacacaacctaatcccactactaaatcacacaacctaatcacactacttaatcacacatagttaatcacacataaaataataataataattagcaagaggagagtgtggtgtctataccgggcggatttgagtgtacgttggtgtggaactggacaactccggaaggggtcccgacccaggtactaattacacaactattataccgtagaaaacagtgataaaaagcggaagtagtaagttacttgcaagggccaatgccagcaagacgatgcttgtggaaatgggcaccatccaagacattaaccccaatcaaagccaactctcaaccaaaatcaaatcctcactcaattccgtatacacagttttattccatttttaccaattatttcactcttaattatctcatttttactaattatttcactcttaattatctcacttttactaattatttcactcttaattatctcatttttactaattatttcactcttaattatctcacttttactaattatttcactcttaattatctcatttttactcttattttactcttaattatctcatttttactcttattttactcttaattatctcatttttactcttattttactcttaattatctcatttttactcttattttactcttaattatctcatttttactcttattttactcttaattatctcatttttactcttattttactcttaattatctcatttttactcttattttactcttaattatctcatttttactaattatttcactcttaattacttcatttgggtaaataatttatttgactaaataacaatttggctgggtaatttgattaggacttgggcgagtctgtgcgtctggcgtgtgaactgataacttcatcgaattccacggtttggcgcctgtttatcctccagttgtggaataaactcctgtttaacactgacaaatcagcgattttaaagcttctaaacacggtaatccacgcgcaaaatgatccgaaacgtaatttatacagttaatacttaagtttagagacaagtttacagggcgacatttgggaatctatgctttataacttaatttacgtcatggacgaggagtttgtcaggacagttctcaacctcatgcactcactgaagctcaacgaaactcatttctactccaaaaaagcactccaatactatcaacacaatacgtaaccacgcacaattatgttatgtttaggatattactgtgtatggagtatcagtgtaatgtatgtaatgaagtgttgttgaggagggaaaatgtgaatttgttcaagggtgagatggttcttatggacttggcaaagttacaaatgccaaacctcattatgacctcaaaagtcgactacgaatacaccaggaataacattttcaaggaaaacgacattgtgctacttttacccagtgatcacactgcagcagatcccaacgtattttctaactttacgttataatatctcagacacccggcctgatttgcaacgttctgaagcacagagttggcaattttgtacttaatatgaccttaaaatttgtgtcactcatttctaaccccttggacggtacacagagtaaccctttggacactgcacagagtaataatttggacagtacaagggataaatcccggtgtttggatgagtttgggttgttgaattattcgaagtatgttgtgatgtatgtaaaatcgttaattccgtatttgcggatgattgaggcgacacagtccctgacacacgtaatcttcccaatcaacgtaagatattaacttcataattctcagacgaacgccggcaaatactctttcacctacgaaatgaaggaaattttactaaactccaagacattctcaacacaacccacacctaactctgtaaccataacttaattatttctaacgctaaactattaatattgtgtagttgttgacgaatatgacgttgacgccggtccagtacacggcgtgcatgtcagcgttaaggaacccgttaacactgattcaaggcccgccaggtactgggaaaacacacgtagcatgcgctatcatcgattgctgggccaaactcaatccaacaaacagaattctagccgttgcagactccaacattgcaggttcaatcatatagtttagtcttcagttagttagttatacagtagttaattatatagttaataatatagttaataatatagttaataatatagttaataatatagttaataatatagttaataatatagttaataataagtagttaataataagtagttaataataagtagttaataataagtagttaataataagtagttaataataagtagttaataataagtagttaattatatagttaataatacgctgagttaaaaaattctgtagccgataacttgattgacgccttgacgaggaagggcataaatgcgttaagaatcggtcaaagttccgagtatgagctccaggaagactcaatcaaacgtattttcacactaagacaacttaattgtatagatttggaacgttataattcgtatgtgaaattgaggcagtcaggctactataaggaggcgaaaaatttaaaggttttgttatattccgaggctattaagcagcataatattattattgcaacctgcgtcggttccgggaatgatctgctccacaattaccaattctcacacgtcatcatcgacgaatgctcacagtccataggtctccacaaagtttaccaaatattcatttctataccataaactaagtaatgtgtagagatgagtaacttgataccgattgggaagggatgtaagtcattagtgttaatcggtgatcacaagcaattacgaccaacaatcatctccaatcacgctcttaaacttgggtaacccatttttcactatttatagtattttacacatttttacacatttttacacattcttacacactttacacactaacgtgtctttttttacacacaaaataagacacgttctacacacttacacatttacacacttacacactactgtgtcttatttcgacactaacgtgtcttttttatacacttacacactaactatagtattttacacacttaaaatattactgataaatatattctgtagactggacaaatcattgttggagcggttaatagaggaggaagtggctccggtacacatgttaaatgtgcaaaggagaatgcacccctcaatcatcgaattcccaaacatgcatttctactccaataaaatacacagtcaaggtaatgtaaattgtgtttacagttaatatacacaattttatgcccagttaacagtgttatcagatgtcggagaagtgaataggagtcgtataagaggatttaagtggcctgtggagtgttataatgttgtgtttattgatgtgagtacatcaccaagcacacaatttgaacttccccaaggcaaatccaagtccaatctcatgtaaatatttacacagttatccataatacacaattatacaattgtgattagtgaggtaaagtgtgtgatggcgttgttgaattcgtttttaagggcaaatgatgttaaggaacaccaggtaagattaataaggtttaagagggtttagattgggatcctgacaccgtatgacgctcaaaaattattaatcaagaaatgtcttaaaacactcaaagtatcatatccttagatatacccctagagggagctatcttactatacttaattgtatacccctagagggagctatcttactatacttaattgtatacccctagagggagctaattaactataccataactatataccccaagagggagctatcttactatataactatataccccaagagggagctacttaactatacttaattatataccccgagagggagctacttaactatacctaacacaatatgccagggattggagagtggtatgattgaggttgacagtgtggatgggttccagggccgtgaaaaagacttgataatcttcaccgctgtaagatcgaatctcgtaaaggatattggattcctcaaagatcccaggagaatgaacgttatgctcaccagagccaggagaggtcttgtcatactaggagattcacacactctcatgtaactatactacttatataccccaagagggagctatcttactacttaattatatacccctagagggagctatcttactgtataccctaaatacctaactatataccccgagagggagctatcttactatactataactatataccccaagagggagcaactttactatataccccaagagggagctattttactgtataccccaagagggagctacttaagtatataacttaatatgtatgttactgtgttgatttggtgattaggagtgacagggagaattggcgtccgtatttgaattggatttactcaaagtaagattaaataaattaaatatttttagaggattaaacattcacatttcacaattaaatttatatctcgattaccccgaccactcactcccaaaatcaccatcagatttacacaacctgaatcatccaaacacttcacattaacacaacaatttaacacaagataaaataatttgataaaataatattgaataaatttaaaataaattagataatttttgaacacgataaaattgtgggtaatagaattattataaaatgtatgattggaaatgtcgaattatagtgtaatttttaagggatctgctgtatttatcgcaatttgcctatcactctgtattaccattcccatactcctcatacgcaaaattaacccaaacgaacgcaaagactttttctcgtaattttcacactattctatcaatttacactattccatcaatttacaccattctatcaatttacactatttttacacaattatttaatttaatttaatgaaaatgattaaaaattttaggctggtgtttttactcgtacctctaggcaccttctgcctatggctactgtaactcccttaaccatataccccgagagggagctatcttattttgtacccctagagggagctatcttactatatacccctagagggagctactttactatatacccctagagggagctactttactatatacccctagatataccccgagagggagctatcttactgtatacttatatacccctagagggagctacttaagtatatacccgagagggagctacttaagtatatacccgagagggagctacttaagtatatacccgagagggagctactttactatacttaactaataccccgagagggagctacttaaatatatcttaactatataataattatatgcttattatatagtaataatatggttaatatgtgaggggtggatgataatgttgtagatgggtgagtatgtatatgtctcagatgaatccgatgataagtccgatgcgcgtaatattcaaaaaggctgaaaaaatcgtcgaaaaagtctcggaaaaaccaaaaattactttaaaatattaactactcattctcacaattttctaatattatacaccttcatactactatggattgttaatactgtggaatctgttaatacttaattttgtgatacttaatttggtgataaaatgtgtgatttggtgagatggtgtaagaaatcttgattgtttggtgagttaggttgtgaattttttgcggggtccccataacgttgttttgatcccattggcgttaggtagtgtaaatattagtgcccctacagataaaagttggtaagcttaaaacgtagtaaaataaaattacttcaaatgacagagaaagtggatccgcagtcgaaggagacgaaacctattgcagaaggtgaaatcagagtaaccacactcggcagggtttcaaactatgttacctacgccaaaaaattactctccaacggtattccagtcatcaccatcagagggaccggaagagccatgagcaacgtagtcgaaaccgcagaaatactcagacacatgatcaacggactacaccaagtcacaaccgtcgatacccaagacagattgtaactctttcacacattttcaacagttatattactctttagttagctcactcttctctatgtagttctccttaggggtatatagttatttagctccctcttggggtatatagttatttagctccctcttggggtatatttaagtagctccctctccctctcccttatatagttaactatctccctcttggggtataaataagtagctccctttaggggtatataattctaagtatataataaattagctccctctcggggtatattattagctccctcttggggtatataattctaggtattctaactatatttaattagctccctctaggggtatataattgagtataaagttatttagctccctctaggggtatagttagatagctccctctcgcctagatacctgtatatacagttagatacctctgtatactcttagatatagttgtataaagttgtataatgtgttagggctgatgggaagagtaagtctaaggacacgaagtttagtgtttgttttttgacgatatcgttatctctggacccgagtaagattgacacaaagtctatcggctatcaagcacccctgaccaaagaaacacttgacggcgtcgacgtggaccaattactacactccaaacgtggaccacgctccaactcacgtattatacataccatacttactactatatactatatactatataatattaattatatacccctagagggagctactttatatacccctagagggagctaatttatatacccctagagggagctaatttatatacccctagagggagctactttactatatacttagtactatgtaccattaactatactatctactatatgtatagtaatattactatggttaatactgttgtaggtaggaaccacaaagccggttctaacaagtagacaggaagaatccaactaccaatcaagattactaatccaactactaatccaactactaattgtgattactaatcaaaattattaattgtgattactgatgaaaattgctggttgtgattctgatgagttctgaatgttgtccgctgtacaaagaaaaaattacctaatttactttattgtttgggtaatttgatatatgtggacttgtactcaactgtctcacctcacctaaatttataattttcttccacattccacacaatttcacaccaatcattatttattatttattatttatattaattatttataattatttgaacaatgtgcccgacgttttgagttaattagaaatggacttgttgctgaagaatcataaggggcaatttatggaacgggttaatttccccgtggacggcaccgtcgaggattttaaaaccttcttctacgaaaaacgtatttttacacctttttcactgacttcagaccgcttctaccccgaacgacaacgatggaccgttaattcacgtaattatttacttactcattttgatcagtcaccgggcccgtcctaaccgggaataaactaaccgaaaacggcgtcaccgacggaacttcactatatttcaaggatctcggtaatcttcacattattcccattattcacactattaataattattaattattgataattattgatattgattgatatttgtgtaggagttcagatatcgtggcgtttggtgttttttatggagtatttgggaccgctttttattcttccgctgctctacttcttcccctccttcttctacagaaccgaaccgctcatcagatactgctcccaaaagtatttttacacattttcccactgttatgtaattattaattgttgacaattgtgtagattattgtgtagattattgtgtagattattgtgtagataattgtgtagataattgtgtagataattgtgtagataattgtgtagataattgtgtagattattgtgtagataattgtgtagataattgtgtagattgattgtaggtgtggatttgtgatgttgatgtttcactttttgaagagggaattcgagacctttttcgtccacagattctccaaagaaacaatgcccatcaaaaatctcttcaccaactgctttcactattggtacacacacttttttacacatttttacagtatttacactatttacactatttacactatttttcagtattttacattttttacacacactaatagtattttacacactaacgtgtcttttttttacacactaaataagacacgttctacacattattacacacttacacactactgtgtcttatttcgacaccaacgtgtcttatttacacctttacacactttacacatttacagtagttatttacacacacttagttacacgctaaagacacgttatacacacacggttacacactaagttatttggtatgtgtattaatgtgttagggtattgtgtgcgattgggatagggtattatttattccatcctaattacaggcctgtattatttttcactcgaggcgctgaaaagattattttattcgcactcttcttcttatttcaatttctcaccttcatgactcatctcacactctgcagactacgaccaaaaggtttttcaccccttttactcatttttacacaccttcacactattttacacacctttacacagtttatactttttacacattacatatgcataatacaatatgatgtgtaaactggatgatagggacggtggtgagggggataccgcgtgattgggggtttcagtatgtgtcgtgtgcgaattatttttgggagttgttgatttgggttgacattgcgttgtttgtgaatactctcacggggtattttttcgcatttgccgtgtttttaatactggcaaactgggccaaaaagaaacataacaaatatcttaaagaatttccaaactatccaaaaaacagaaaagcactcatacccttcctattttaatctcatacccactatacacactattatttaccaccaacacccttaatactattaatactaccaatattacctataccatgtatatacactgtatataatacatagtatatagtatactattacagtagtattagtagtataatactaagtatatagtaagttagccccctctcggggtatacgcattaactatctccctctcccttagatattaagatagctccctctaggggtatataattaagtagctccctctaggggtatataattaagtagctccctctaggggtatataattaagtagctccctctaggggtatatagttaagattataggcatagtattgtattgtagtagttaagggtatatagtatagtaggtataatagtatataatatatagtatatatactatagtattatatgtctgggtttaagagtatagtacagtagtaatatagttaagtaatattatatagttaagtagtattagtagtatattatagtatgtatgaggattacgtgtctgggtttacggctagtaaatcaggtgtatattacatagcgaaaacaactctattatacatatttaagcttattacaacagtattaaggagtatttacactgtaatgagtgttatcttactgtatacaaatgctatataatatactcctactactatacacattatatacatagtatattatatatagtatatatactatagtatagataatatactactctatagtattactactactacaatggctaaagtaaatatgttatattagattaattggtttggtaacgctttgataatattcctgtatctccggactactagtgtgatactccggatctacctcgttaatctcaagttcctgctgatacttgacatattcatcaccgattattgagaagaccggctcataaaacggatatctcacactgccataccttttcctattcttagtatgtgtaccagacttaatatccccgtaaagctctgctgaaacggttgaatctgcgctcttgccggtttccgggtctatatcaaagatatcctcgggttcaatgtactccaaattcttttcaatggatttaaagttggagattaggccgacccagttcctcctagtcttgggctcaagttggtacaactccccgtttaacctcgagatgaacatgaacttgttagtatttgggacccaggacatttgaataaagcctttacactttgaggcgtccataacaagtttgaggccgtcgacgcctgatttacacctgaggtcaaatatctgaaacccccactgggaactgtaattcgtacacatcgccaaatacccgtcaaccctagcattactaaaacaacccaaactgtaacgtaacttcaacaccgggtcatagtgacagtaataaatcctcaaactgtcaaccaccaactcgttttccaccaccacctcatacagcctcaggctactcacatcattattattattagtaatagtagtattattagtagtattagtggtggttaattctttatcttcgggagacttagagatagttaacagggtttcatctgttttaggaggacttaagtccctgtcctcaggggtttcaggttgtacaaagttcatattttcatcagctgtagaccgtactaaatcctctttatcatctgctatatttactgtaggtccactagttactataggtccacttttagactcatctgtacgttgagaacttcccttatcaacactattactactaactactgtggaattagtcacagtgttatgtgtggtattacacccagtgttagtgtttgacttggtaaaaaagcgtttgaaaatgagtttggtggttttggaattggctgtggtgtatttgaagacgtagaaccggtcgtagacgaggatgacaaactggttcccgagcgggttcgggatgaacatgtgaactctaatgggtaaatttgatattgtcaagtctgccaacactttagagtctgtcctccccaacaccgttgatcttaccactccactctccacgtgtaagtaagtctccacggtgaactttatcatcactatagtcgacaccgggacaaatccagcaaatacaaactcttccacatacttcaaatagtattccgagttctccagattgtccccagggatctcattgttgtccctagggatctcacggttgtcctcactacactctgagaagtccacagtagactccagattgtcctgggtacacccagagtgcccactgttagtactaaacttcaatagtgaggtgagattttcagtggtgaacttcttcttgagaaggcagaaggggaagtaaatggacttaagttcaaagggtttattaaacgccgagttaacattaatacccgagacatattcctcatctcttaacttattatcattattattatccatacttgaccctggatcgttgtgtatctcctcgtctaactcctgcttcaactcagataagtccgggaatacaccagccaaatccgggttcgaattagtgtctaaacctaatctacggtctccattgtttaacccgggatctccattgtttaacccaggatctccacagtttaacccgggatctccatagtctaatctgttatctccatagtctaatctgttatctccatagctaaatgtgtgatctccagaacctagtttgtgatccctgggactggaactggagtctacagaacctaatctgtgctctctatagtcaaatctataatccctaggactagaactgtaatccctatagtcaaatttgtaatctccagaacctaatctatagtctctatagtcaaatgtgtaatccctaggactagaattgtaatcagtattggtatgactgtgtgagtagtgaaaatcagactgtgacccgttatcaaagctaatccttggagtgttgtagggattagtaatagtgcctagaccattaataaaagtatcctttaaactcagcttagcgttaaaattgtttaaatagtttctaaaggctagtttggatctggttcttttcggcttcctaccaggtcttttcggtaactttgtcttattcttgaagatagcctcttcaaattctctattctgcatttccttcactagtctatactcatacattcgcattctacagatttcttcactataagatttacctgtgtcacttgacaccggcgtcaaatccacatacggctcttcctcctgtaattcatacctaaacttttctgacaaatctacatcatactccatagttgtaaagtgattgaaaacgttgtatggcacgtcatcgtctagagattcttgtttgattaggcctgtggtggcttggcagtctacaatccaccacctcctttcattaaacacaactctataatacgtaggcacgtaaggtctatgactaaacataaactcaacacacgtcaatagtcgattgtggtatataaagttccggtgtatgttcaacacagtgaacgaacacagcagtatgtagggatacgccacggtgtctagtccgaagtatctcatgtctatactgatcagaggattcaaatccatagtacttagatcataaattagtagaaaaaagggtcccagggctactaaaaactcgttcttctgaccgaagaactgtaagtgttgtatgactccgaggtataccacacgtttcatgccgtatttacgtctggccttttttaacggcggttttacatactgaggcagagtggatttacacttacaattttcatcagcgcagattagcctctggagcttaaagttaattggactatgcgcagttggcacgttgagactaaacgagggtaaccagatggaggacgtgggataaatattaataaactcgtcagtagccgaggctatggtgaaaccgtcacttgaaattgccaaagcagagaaaccacaaccgccaaatccagtcaacaccgtaggcaaacggtcagtaaccactggtctgaccatttcttatagtgttaacgttagttagagggttattttgaaggggttttaggtgtattttaagggttattttagagctaatttgagggttttgagggtatttctagtactaattttagggtttttgaaggtatttaagggtattttagaggttaatttatggtatttcggaggttatttaggagtatattagaggtatttccaaggtatttaaggcttattttagaactattctgagggtatttcccggtatattttgactatttgaggtgtattttagagctatttccaaggggttctgaggtatattatgagggtatttttagggtattttgaaggtatttaggacctttttataacttatttatagtatttccaaggggttttgagactattacagtactaatttcagggtttctgagggtatttccggcttattctagaggcaatttacgcttatttttccctattttagtagtattttagaggtaatttaggtctaatttagcttaatttagaggtaattccaaagtttctgaggctataaagtattaattgtgtgaagtgtgtctgagagttttacagtgtttgcactcgtagtttgagagataattcatgaattcacaccttttacacttccagaaccgttcctggtgatgtttaagttcgtgttcccggtgtctcctacggtcacttctgctcagtttactcccctccgaaacggtagttgccgttaaaatctctgaagaaataccaacaaaacctgaaatgtccaacccgtacgccttgtcaaacgccgatctctcaaattcctccctcaaatcactgtttgtcacgggatcaaagtgttgtgtttgagctaatctaagatgttcagtaacagattcggggtcacgactggttctataccgacttttgtgagtgtatttgtctcctctactgtctctactttgtatacttgtgcttctactccttctactcctcctaatcttgctgctactccttgtactcttaagatgtttaaaattgtgagaatctttgtgtaaagatttgcgtgatttcgggctcataataaaaattaaatgtgaaatcacaccgtttaagcattttatcaactttaaacactattgacatataattaaatattccacaacatttgtgtaaaagttgatacgtaaaataaatacaataatatgttgtaataccacaaaacactatttattaagtttttatcttccatatcgcaaaaaatttaaatccttaatttttcacatctttttctggattttattgttttggtgagattttgtcagttttttggttatttttagaccacaggttcactggaaggctgtgtcactatgtcaacacaattcaacaattttcagaacaattaatcttttttatcattttgtaaattattttaaattatttttaaaattttgtaaattattttgtaaattatgttttgagaatgtgtgtcgtttgtggatctgagtttactaatataccgttgtaacaggtgattcctaccatttcttaccctttaaagcgttacttttattactttaaaattattactttgtatcttaccttttacatgcagttgaattgttaatttgctccctctacccctgcatgccaattagacaacgtgtgtaatcttcacacattttaatctttcaactttttcactatttttaacctttttttactatttttagcttttttcaacttttttagaattttctaaaattttctaaaattttcaaatttttacaattttacacatttttcactatgtcaaattctaccacacccagacgtacctacggtaaactaacctcaaaacacacaaatcccaccgtaacagacactacaactccctgtctaacagacactacaacaccctgtgcaacagatataacagttcgtaagcgtaatcatccctcgtttagctcagttgagtctgagttttaccgtgtgtttaccgatcctaagcgtcaaaagtgtgatgacatatcattcctatttaggggcgcttgtaataacattggcacttccactgtgggtatgtacggtgagatttcacactcgagtttgaagttaatttgcaggaaactggtcgagtttggacttgacgacaggagtgtagtgctagacctgggcagtggcagaggtgtcccaaacttcgtcttcgccaatgacgcgaatactttcagctcaattggcgttgaaaagtgtcccatcgcatatctcaactctattaataatatttgcatcgccatatccaatgatattcagaagatcaaatccactgttgatctggaatcgcgaatcaacgatcattcgcacaattccaacaattgttttacagatgtttctactgcatgcagttcgtgtgaatcttgttgtgactctccagatggtaatcttatagaagattatgaatactctgtgaacactcaactggaacccgaagaacccgaagaatttgatgaatttgatgaattcaccgagacacccaccaaacacctcaagtctcccaaacccactctcaacactctggacactgtggacactgtggacactctggacattgtggacactgaggacgtggtaaaccctgtaaaccctgtggacaatgaggatcaagggttaaaacgtggtttggaggagtttaggagtaggtgtgcgagtttgtcgttggcgtttgtgaatgaggacataattgcgtatgactcgtttgagggcgttacgcatttttacagctttgacattgcgatggagcgggcgctgattagtaacatggtttaccaattcaagaacacgtccactgcctacgtgtttgcctcgtttatttctgatttgctgagcacgtttgggctgaccggctgtttcctggccgcaaagataccctgcagaatggcaggcagcggcgaaggcaaaacctgctacatttacgtcaaaaacaactggaaacacattaaaaaacgggcagactccaggctatccacgctgtttcccaatgattctcacactgtcaacactgtcaacaatatcaatcttgatgtgaacaactttgacgagccgtatagtagtttggacatgataaagttgtcgaagatgtcattgtattaccagtacaagtggtacttaaagaggcttggcaagttttataagccgtttgtgacgaggtcacactcgcgggacgtgagcattagagaacagctcgcgtcagaacgagacgccttaattgaacaaatcgcacactcaaactctcaagaacacagaaataaactaaaacaacacattaaacggaatttcaaagtcatctccacctttccctaatctactaccactatatactatattatatacatatttgtatagtatattatatatagtataatatatattatatatataatatatatgtaatatatttactaaattaagggtaaattaacacttatttaagcttatttacacattaattatctgttaaataacgtaaattaatgccttaaaatagttaattaatactattaaagttactttactaaggcataatgacaattggctagctacaagaacgtgtcttgataacactaactgagttataaataatattgttaaaatgtattggcaagtgattcagtttggatatccgcaatttctcgcgattatgagaaatggtaagccatttgttataagaaaaaacggtttacacgagcaatggtacagtgtcactcacctgagatatgacattgccaaattacttttcacagatactgatggcagagattataactacttagagtgtgacgtagaattgtatgaattgattgttgtatttacatttgggtttaagtgtaggaaggtctggtttgacggcagattatgctggagattaccttccgatgctaaggaatttcctaaatatttagcatttcacctgagatataatcaaatgtatcttatgttctctaaattgaggatggagagactggatttggagaatcctcaagccggtgctgtggtagaacgtccagtgtctctaaaaagaagagttcaaaaagataagaaaacagttaaaaaggctaaaaaagtgtgtaatagaaagttaactacacctaaaacttctattgaacccagtgtagaggaggtggacggtggctccacaagcctcaatatacccaggcaaactgaaccacttaggattgagtctacacagttacaatctcaaaattgttcaacacctcaagaaatgccattagaaagttctaatttactcagtgaaagggttagaattgatatatttggaaagaatgacagggacatactgaggttgttccaggaaaactggcacaaaattatcttatgtaatgggtataattcgacttctaatggtaacatttaccgttacaagcttgataaaaagttcctgagcaagaggtttagaaggaattgtgttagaaaacttattgaatcaattgacttctacagggaagagaagattattgtcctgggaactctcatcaaattctctttgtacaagctggaaaacaatgagtggactaagaaagagtatgatattccaccgataaaactgtgcagacggggatattccagaatatttgacacattgtcccgtgaccaatacagtgtcgagttaactatggtaggaggtataaaattggtatttagagtaaaagagggtgtgaaatgtgtcgaggtaaagttcggaagtcgtcctgtatggaagaataattataaaaccacaaactttatcaggactctggtgtacaacctgagagataatagcatgttagtggagagtaacagatttgttaagtgtacaaaggtgaataataaatggattaatgagtctcaaattccgttttatttaaagcattacgctgaggacttgggtgggttaattccagtttacatccacaatgttactcaaataaccaacagacaaaaattcgtacttgactatcaaaatgtgaactttgaccttattaagtaccgtgagaaaatcatttggaggcgtcagccaggtcagtcaattccccaaagtgtaaaatgttaccttggatatgccatcagattacatttccgatttcagcgtaaatttacttattacgtactgaaaggagatgagcttactgaggaacactatccaattccaccaatcagactacttaatgaaaatggtatgggtaacattgtcacactaagttccgaagattatagtgtacaacttagtgtcaggggtgatgttaaaattgtttatactctcacaaacggagtgtgtacccttgttaaatacggtaaaagagtaatttggaactgtataactggtgagaagccactcaatgttttttacaccataggtagtggaagaattgagatcattttcgaggataaaattctatttaccgattcaaaaaatcccaactctattgtacaaaccatcgaaattccgcctgaacttaccttacacaagagaaatgaacggggagaaaccgtacaactcagtcctctagagtacagagtccagacatgttctgaatctggattgagatacactcctagtaacgatgttatctgcactgaacttagacataatgggacagtagtctggagccacactgaaggagaccacaaacccttatcattcaattattactttaaacaaatgaagataatttccgttacgttccactctaaaccttcaatacagtatgaacttcaacaggatcaatggactctaaccaactcttaacccaatcattatactatagtatttatagtatagtaaaatgctagtactaatacttgggtataccaaaacctaaaccctcaatctagtccaaaatactactctactatgtcatacagtatatataatatactataatacatttattaatattcttaactatcttaaatatatacttagtactatatacccctagagggagctattttactacttaattatatacccctagagggagctaataatataaggggagagggagagggagctactttactacttaattatactgtatactgttaactatataccccgagagggagctaattaactatatacccttaactactatactattactatactatagtattatactactataccactatgtatatacactgtatataatatatatatactatagtattataggtatatgtatattagtaggactatactatatagtattactatacagtaagataacacttgtttcaccagtatatactccttaataaagtcattaaaccctgtaaacagtactgtactattataattatacacctgatttactacccttaaacccagacacctgataccatataccatatataaatagtatatagtatatagtagtatgtggagtattaaatattagggtatgaattgtataatttctttggttgcttctttgtatttgaggtatcctctggcgactagagagtctacgattctgttaaactgttgtctggagagtgtgaagtttgggtttttgctaaagagcttaaaaatcgtcgtgctggaggcctccagcatctgcttcaggtataacattatcgtcgactcaatgtacaacatcatatcatcaaatgacgatttcgttattatgtaatccatgttctaaacttatttacaatataaccttaccatgttaaataattcctccttttcaggcattaaatccaacaactcctcacacaaactcaattccaactcaaaatagtcattcccaccctaaatccattattcaatcataattataattgttaagtggttatgtgtaaatagtgttgagatacgcaagagatgaagctgagttctgggttatggaatttgatgagtttgtgatcttctagaactgacagttgtgtcctcatggtggcgtcgtcgtagtctaaacagtgttaactgagttccgcagtaccgggtgacagtttcttttccaactgcgccagcgtgacgtatttctgagtattaaacaagagtaaacagtagccctaggacacattaaccaacaatttattacctgataacttgaaaccctaaactcatactcccgtccctacaattgttatagtgtgtaagtaatattataaagtgtaagatgttacgttatggataatttgtagttctgcggatccgaggtggtgaaggtactggagcgttttcttattaaacttgccgtcgtaatatgatttgaaatctgattgtagttgtaggatctggtctagagttgttccttcttcgggatcgaaggtgggattatccagtggcggttgaaagcttgtgcttttttccatttccacaacttcagaatcggaaaattcccttgaccgttctggcacgtcaaactctctaatattcttctggatccagcactctttgttcaatagcacaacgccaaagttataccgtgcaatgccagaatctatcaccagcttcttcgacttctcgtaaaaatcaaccaaatccgacaatttacacgtatagtcagggccacactctggaaatcgtgttatcccagataaactatataactaagataaactatataactgagataatctgagtaaactgagtaaaaagtgtgtaagaacctttttcgagtgacttgatgatgttgatgtgtgttgtgtcgaggtatttatggtacaggagtctgactgtcaggaaggtccgaatacacatctgaacacgataaacatgtgtaacaaacttcaaagtatgatttatttgggaggaattggaaaatgaagagaaagaacttcattttatcttgtacttcagaactattgatatgcagttcgtcacaatatttgcctaaaaaatgttaatacttgcctaaaaaatgttaatacttgcctaaaaaatgttaatacttgactaaaaaatgttaatacttgcctaaaaaatataacactatgagtttaccaaaggtgagagtgacatattcgataacggagtcatttgtcgcaaaaacggagatccaaaatttctacaaattattactcaattgactcaccttgatccttgagttgtaatcactttgagtcgtgattggtctcgcgtatttttctatcttgtcctggtagtcactcatctcactcaccaacaaatctgatttttcataatccctcgacttcacgtagtcactcaaatactccgaaaatatctcctactcattatagttaaatattaacagtagtaatcactaagtaaagtgtctttagtgtgtaaataagacacgttagtgtgtaagtgtgtaaaacgtgtcttatttagtgtgtaactaagtgtgtaaaatgtgtagaaatgtgtaaataaggtaaataagggtaagaatgtgtagaaatgtgtaaataaggtaaataaggtaaataagggtaagaatgtgtaagagtgtgtaacggggtaaaaaatactttgaatgctttgaagagattatcgaggaatagtgaggtgtattctgagttggagtatagtgagttaatgagtagaatagtgtccagatcatcgagtttgattatattctttaaccgctcgtgtgatatcaggacgtcggattttatgtataaaagctcgtttttcacagtgtttatcaccttaaccgttgtttccgggatcaaataacactcacacgacctcctctaatattcaatatactatctttgaatatctttaaatatgtgtaaatagtgtaaaatgtgtaaaaaaagacacgttagtgtcgaaataagacacagtaatgtgtaagagtgtgtaagatgtgtaaacgtgtcttatttagtgtgtgtaaaaaaagacacgttagtgtgtaaaatactattagtgtgtgtaaaatgtgtaaagtgtgtaagatgtgtaactagggtaaaaatgtgtaggcgaacttccagatcaatggtgttgttgaatttgtagaagcaatcgacgtttgaaaagctgttcatgtaatctcgcgacaggctactgtaaaaccgcgtcgtgctcagcaataacttctcctcaaactcctcaaacaactgaaacatcggatttactctgacaaactgtgtacgctagtgattaactagtaaaaagtgtgtaccccgatggagatgaagagattaatgacattttgtagttgtgtgaaattgacatttttcccagttctgtaggaggaaacgaggtttaaaagcgctgattgcagattatcgtacagtgttccacgttcttcacagtcttttttaaagtactcaaccaccttttcactacaacattaaattcactaaggactcacatgtacttatgacatgactgcggcttatttaatttaccagccagcggatcacacacctttatcacctcaacctatgacattatcaggttactctgacataattggatatatttagaagacacaattccggtcctgatcctgcaccagaaggtttcaaatttggtgagcaggttaaagtattcctgagactcacaactgagcgcacgtttagccctcaaattcccttcaatttgaccaaaattatcctcaatttgaccaaaattatcctcaatttcactaagcaaattgataaaattattaatacctgagggattgagttaaaagtttattgagcaaattgtcaatttctctgattagaaattcagttttctcataagaaacacattcccttacaaactaaatcacttttattacgaagtaacaaacctcctggagtcgaattctgcaaaatcctgaggaatcctggcctaacaacactgcaattataaaccgcctcaactcctcaaactcaacatcaattacctcacccacattcagccaactttctacaacaattattaactcaatttacctaactgtggaattattaattggagtaccattttgtatggaagaatcgatgatcctaacggcgccgagttttaacaattccattaaccaagttttaacaattccatgaaattactttacaaataataaataataattaatttggggtaaaataaacttgtgaaaataattttaagattagcatcaaattaatctaacacatcagataaaaaggtgaatagttaaatataatagccaaatttaaaccattaattaattaaactattggataaatttgtatataaaaatgaaaaatggtaaattccttaaatctcacaaatttccaaaattaattaaaaataatcaaataatttaaataaataatttaaaataattattacttaattttattacttaattttattaaattattttattaattttattattttttttaaatggattctccaggcttataacagtagggaaagttgtacaataaattattttttaattttaaatattaaataatttttaaatttgaaaatgtcaactaatttattcactatttgtaaagtaatttattcactatttgtaaactaatttaactatttaaagtaattaaaaatttcaaccgcaggatggagagtaaacggcctccggatgaggtattatttaaatgggaccctaagggtaattttacttctctaggaccaactcctggcgccaatttcaccaaacgccgaatgacaaatttgcacaattcttacaaaattatcaaccaacttaaactaaatgaattggagttggataagatattaaaggaatctacgacggagggtttaaatgtgagaccggagactttggagaagctccgtgacaaacgggcggaattgcttaaaaatttgaaaaaattccaactccacagttgcaaggattggctcggagaaaacacacccaagtcaagtattcacaaggtggacactctggacagattatcttcaatgataattaaccccgaattcccaattaaacatgaggccgtactttacagcgtgcaattggggaaatcagaccttgaattctacaacgccttgtatctcacaaagttgaccagaatgagtaatccaaccgtgctagagttaattagacaaccagttttcatcagggatcgaatgttactactgactgacaggaaaacatgcaactgcccactcaacgcaatcacaaaacaaaccacacaacgacatcttctacccaggagatcttttcacgatacacaatctcaaggtaccttttaccccttaactaatgttaattcttaataatactataatactactatacttaaatatatacccctagagggagctatcttactatatacttagtactatgtacccctaaggagagctacttaactgcacccctaaggagagctaattaattgcacccctagagggagctatcttactatactactataatactactataatactactataatactactgaatactactataatactactataatactactgaatatttaggggatggtatattgaataagttgatgagtcctggtgcgaatcctatgagtccggggttattctcgtcggatcggagctggtcgcaaacactcctgggtactgtcacaactaattcaacatgtttaggcgctgagaagaaacatgaattgccaaaagatgacattagtgacggtgatattgtctgtccctttcacgttccacaggacttaccagaacagctaaagtcacctaaaggacactctggatacattaaagattacaatttactctaccgctctgattccaccgccaacgaacactttctaatcctacaccaacttactcattctactgtgaataacactggtgacacagtgaatgacacacctggtactccaatgggtaagtacagattaccgtcaaaattgttgtcgattaattctgtgtacttgagagactttgaatttgagcgtcactactcttgtaaaccgggtgacctcagggctaacccggtcaccacaggagacactgtgagtttatccagtgtttacacaggattagctctttttatagctacaaagactgagttcctcatttgcatcactgatcacactagattaacattttgcacccctaacacacagtcatcttgcacccctgataacactagcttaaaattttgcatcctattgcgtgaaaagaatttaggccacagtgtggtggaaatactatcacacaagagcaccgggcgcatatttctactagcgactaatagcttattatacgaatatcaataccagctcggctttaaatcaacctcacttctagaccataaaattttcagactcatccatggagcatttgtctatggtaagaatttggtcacagcgtgcatcaggaggaacacagtctactctcttcccagtactaatttgacaaatactaactctgtgaccagaaataactcagtttacaattgtctggagggactggagaaaccagtcgtgggatcagttctctattacccaccacttctctggggtcaatcacacactaacaacactagtgacaatgataatatatttcccaatggatctcaatgtgcatgtggtttgggatgtaggaggtacaaggtgaacacgtacctcaggtgtataaacccgtggaataaaacgtatatgaaaatgtcagacagtattggaattattgaccaggaccggtcaataatctcacttttaaactcctctacgggggatctctccgttttctacattcactccaatatttctctacaggaatataccaacagtatccacaggggacatcgcatatttccatacgatttaacattatacaatttgagacatagtaatataattaactctttggataaattggggtacgggagacattcgtacggtacgaagtttgtgaagatgttggcgccgccggtgaactttgtccagggcgttgacttgattattgtggacaatttaggcactaggattttcatcgggttctccaatctctcacttgttaatactaccggaatcgcctcagtcaccgccactctaaacccctcagacaccattcacattactccaaactctaacactaacacacagagtacactgtctactagtgcacagagtactagtgcacagagtaaattagtattatctgtgaagggatttagagtatcaatgcgtaatgtgtgtcagggtgtgggatttgcaagaggtccattttcattattcagagcaaagcctaatgtctccagtttcatggttgatgatttgtttatcacgatggagcctgtgaggaagaataacaacgggacgctcattagagtaattttaacctcaaacgattccacaagcttctttcagaattatcccacactgccactctctgttactgaggagttttactacttcaacgaggatcttaggtataaaaatttacaggagaatcagcccgtagaatactaccacgagttctatctcaaactcacagataaagaaaagattctatccgtacacatggagacatctgttttccccggtaaacccgattctatctcggttaaccaggagttaattaataaggagttaaattgtaaatctaatgaattaggggacagtgtgactgggagtaaaatggtgatagtgacaacggagaaggtgtacaaatttaacagattagacttgaacttgatcatcaaactgttgataaagtatactaaaaacgcggtagatctcattaaaccaccgccaattctctgtacaccaacacacaatcgcaactccaccaactccaccgtaaattattcacaggatgaaggagatgtacaagatgagagatttattctgaataaatatattaaaggggataaagaggagaattactttataaactctttaaaggttggtaaattatcagagtgtcccgtgaactctgtcaacactaaccctggcactgcggacatgtcagagtatatgaaatacttacaagggaataaaaagaatgaactgactgacatttttggcgaggatttagtcgaggtttgcgaaaactcaaaggaactcgtgggatactctttgtactacctctcatggctctacgggcctgaaacactctttaaacatcttttcacatatttaaccgagttaaaacaggattttgatcatatttcagataataccgtggtgaactctgtgaacacaagtaacgtggtgaacactgtgaatacaatgaacgaaactgtggacagggacataatatataaatatttgttgtgtagtttggacgattataatgtgtttatgggtagttttgggatcccttcgaggatatttaactatgtagtcccaggctgttattcagtgctggatcacaagtttgagaagcctgtaatctcaccctggtgtaatttcgtctctttttccaataataacaaggttaaacatgccagagttacggccaatacctcacctcttgttgacggattattactactggtttcagaacttttgacgccaatttatcttaacagagtattgaatttggtaccaaatttacacactctcacggtgataaacggtgtggaaggtaattttaacccgatcagcgttaacagagtgaggtacaccctcaataatttagtgttagacaaatttgaggatgaaaatgagtttgtggtgggcagtagagttgacacttatttaactactgagctgtcaatgggactggaaatggctatgaaacagttggagcagctgaattcactccactcgatagcgctggaactgataaaaaactaccaaaagtgtaatctggagaatgtaattctgttaatgacaacactgggcccaaatgtccagcggatgatcctgaagccgaatttacaccaatacgaaccgtatccagttaactcaggcccacttccagacagtttctccaccacaccgttcaccgatttgtatcacaccaatggtacgggagataccactgcgaacactggagataccactgtgaacaccgtagacgcattaaaatccttgattattgagcggtatgaagctgatttgaggacgttgaaggagttggtgctggtgttggaggtggctcaggagtttttggcctcgtgtgtgctactgcaccgtagcactgcgctgggcgattacaagtatgaatttgacaagaacttgcatttagtaactttgcttccctcaaaaacggcgaattctttttttacgccgtcggactatgtgccaaagtctgacaaatttgtaaccccgtttaaatgtaaatttacccgcgaatcgcccaaatccaaactcacaatcacccacagcatactcaacatcatagcacaagctaatttaatcaacctgtaagttaccaatcgtagtagtaatactagtgaatcatagtgaatcatagtgaatcatagtgaatcatagtgaatcatagtgaatcatagtgaatcgtagtatttatttccactgtaaattaactttataatgatttagatttctgaataaggacgtgtacaagttgtttagaattgtggtttggctcatcggcggtgatacttcagcactagaaaagttcttctacggacacatcttcacgtatttccccactcaattctatttataatatctattattataattgtgattgtgaattgttatgtaggtttgaggagataacgagtatgaacaggtgtaatagggtaaagtatttggagcgtcactttgagaatacgcaggacgcttcaaagtgcgaatacatacactcactaattaaacaatttaccattaactaattaaaatcaattttaccaacatacacatatatatacatggtatatattacacagtatattcttaagtataagtatagtactaggtatagtaaatagttataacagtatagtaacagtatagtatatagtacatattatatatagtatagtaacagtatagtactaggtatagtaaatagttataacagtatagtaacagtatattattaagtatagtatattattaagtatagtatattattaagtatagtatattattaagtatagtatattattaagtatagtatattattaagtatagtatattattaagtatagtatattattaagtatagtatattattaagtatagtatattattaagtatagtatattattaagtatagtatattattaagtatagtatattatgttacatagtatatattattcttaggtatagtatatagtatagtagtatgtataaggtgtctgggtttatggctagtaaattaagtgtatattacatagggtatattattaagtatagtaatagtatatagtacatattatatatggtatagtatagtatattatattacatagtagaggaataggtcttgaattatgtgattttacacgttattagtaaaaggtcccggtttaatattaaacgattaaactttaaatattagctcctaaacgggctatgatttaggaagaaccattagcagaatcagtaggagcaggagtagtaagagtagcaatagcagcagtaagggcgtcaatttttgcctcaagggttgcatattttcggtcaagaataagatctgcggaagtagttttagatttgacttgtctagctgaaagagcttcagaatctctagcatgttcaagtttctcttcaagtttcgtgagttgttcttgagtttcagcaactttagccattgcggatttagcttctgcagctttagttctggcttctctagctgaaagagcttcagcatctctagcatcctcaagttttccttcaagtttcgagagttttgcttgagcttcttcagctttagatttgacttgtctagctgaaagagcttcagaatctctagcatcctcaagttttccttcaagtttcgagagttttgcttgagcttcttcaactttagatttggcttgtctagctgaaagagcttcagaatctctagcatcctcaagttttccttcaagtttcgagagttttgcttgagcttcttcaactttagatttggcttgtctagttgcaagagcctcagcatctatggcatatctaagtcttgctctaagattggcattggttctgtcttcttcaactttgaaagcttgacgtactagtgcgtatgtcagcttatctcctggaagacctttaactaagttgaagcctggaaccatctcaagaacagcaagaacaaatttaaccatgtcaagtggcttaggagtgccaaacctatcaaatacaaggaaagagtcagatacaactcccatgcggtgggcgtattccaggtgtacgaacttcttatctgaagttggtgtgcctacaaagtgtaagtcaagaagaacttcagaatcgtctcctttccataccacgtaggatccacagacaacttcagttaccttattatgaactggtttgacccaggtgaagtagtagtcaacaatcttgtacgtcttgtggagtaatacggtgtcaggaagaggaccaagggggcagccagatgatacttcgggtttgtcaccttcaggttgttttcccaaaagggcagataccaaaggcttcaagtccaatttatcagctgatacatggaaactcgcggtcaaggctgtgaagaggacaaaaatagtaaactgcatttttgttactaattcaagttaactgcgttagatttaaatgaattccagcggtaagttactgttcctatctatgggataacagtaaacctattcttccccattcctcagtctgcattcatcctattatcgtaaaaattagtgtcagaattgttaacaggagtcggtcttagattattaagtccagaagtcgcatattattctcctagcgttggtatagcgttttcaagttcgtggattctatcccagaacaattaatcgtaatataccaaagtagttaacttatacccgtagaaagatatattataataaatatatagaattatattcatatagtcaccggttttagattattatagatgtatagtcacgcgttttagagtattataggtgtatagtcacgggtttcagactgttacatgcatatttataaggaatttcatagttatttcggtaattttaaacagatttctaaaagatttttgcctaaaatgctcctttataaaacttaacctaagataatttatctacactcaagttaatttttagctaattaagggtaataactagaaaattttcgctaaacgctagatattagtagttaacagtacagtacagtcctggagcacataataaaaccagaattttagatactttaaactaacttttagaactaattttaagcagtttgatcactaaattgatgtttggaatgtgttagaattgtttaatttattagttaaaaattttgaaaaaaatttttttcggaacccaaatgtcacttttggatccgggccattttaggccaaaaatcaaaattttgttttcccaaatttccacattactaacttgattaatgattgttaagcatcggaaaattataattaactcgtaattaactgtgtacactgagtaaatagaccctaaactactaatttacaaggcctggataattagcatttgggtgacttaattatattactaagtacgatatataccagcaaattgaattttaggtatatagataatagtttttagagtattattagtatataattagggaattttatatttattttgttaatttaaggggagtttctaggatttgttagcccagaaatctaatttatttaactcaatttaggataatttatctattttaaagttaaattagtgttattttagggtaataattagaaaatttatctctactagagagataaaactgtctaatatcctgtcaagtgtagcaaaggatgcataaagaacccaaattctccatagttaaaactaacttttagaactaaataaaagtagtttgatgactaaaatgatgtttgtaatgatttggaatcaattaattaaaatttctaaatagtcgaaaattttttattttttcgggaaccaaatgtcacttttgggtccagggattttaggccaaaattcgaaaattttgttttccaaaaatttccacatatttgaacagatttaacagtgttaggcatcagaaaattattataaagtgaaaattagctgtgtacacagtctatagtacggcttgaaagggccaggataataccctgaggggtacttaactatagcaataagtgtatactatactaaatatttagtattttagatatatacataggattattctagtaatatcagttatataattagggaaatttatttttattttgtaaatttaaggggaggttctagtctttgttagcttaaaaattgttttatagaactcattttgggataatttaaggttatttcaaccagatttatctatttttagggtaataattagtaattttctctctaatagagagataacagtagttaatagtaccatggtacagtgcccaggtacctacaattacccaaaattaaacactcaataacatcatttttagaagaattttaagtgatttggtgtctaaaatgatgtgctaaatgtgttaaaattgtttaatttaattttctgaatagtcgaaaaattttcattttttcgggaaccaaatgtcacttttgggtccagaccaaaatgaccaaaattcgagaatttttatttttcaattttttcacataattaactttaattatcattgttaagaatcagaaaattataattaactctaaaaaagctatccacactgagtaactgtgctataaactacgaacttagtactatacccatgtacgtgatatatattatattactgtgtattaaagctgcagtgtatatagcgatagagaaccttatttgagtgactttccatgacgatatgaccgtttcgctaaagtaaaataaaaattaggttataaacgtacagaagttgaacgggacgtatttgtacttgatcatgttcttgatttgctgattcattgtggttaggaagaggagtacaaagtagaggaccagcaatggccaaaaaacgtcaacgtctaaaaagtcgaaaaagagtgaagcgcaggcgatataagtaactctgactgcggagagccagaacgtgaactcgttcatttgtctcagaaaaggcttaaattcatagacattttccttggagtttaggccagatttgttaattttagacgagtttaaggcttcctgttcgtttaagggcaggattgtgcccttgttcgcgtcctcgtgagctgcacataagtcatcaaagctgagcggcgtaataaacctcagaactaaattaagtaagaagacggcgtacatatacgcgactacgtagtgtgatcctctggtaataattacgagccagaagatgaaaaataaaaccgcaaagtaaatccaacgaaatagggtatattttaccgtaaaatcaagacaactccgatggaaaattgtaagcttacggagccacctcgactgctcagaaaaatccatttttataaccttaatttacaataccgtcaccggtaatagttatggcaagattcgcgcaccaggtgaaatccttttctaaacataaataaatttaatttatcataaaaattgagaatttgaagattttcaggaatttaaagaaattattaatttacaccgacgggtactccgtagcaccctaacaatatcaacaacatatacaaattaactacacaattgagtaaaagaattgagtatacaattgagtatacaattgagtataagaattgagagttagaattgagggtagtaaggtgggaagggttgtgaaagtgttaggaaaggcactgtgcgaggttggagattcctccggaacagttcccggcggatcgttgtacgtttctccgatccaaaagtaacgtttctgggatgtaaacttcgtcgtcttgaatgtccctcagcactgccctctttgcgatttcgttaaatgcatttgccacattcaaagacgtcttcgcgctacacatttacacatttttacacattttacacatttttacacattttacacattttacttagtttagtacttatttaggctttatctagaggttatttaggagtattttagtgttatttagaagtattttagtgttatttagaagtattttagtgttatttagaagtattttattgttatttagaagtattttagtgttatttagaagtattttagtgttatttagaagtattttagtgttatttagaagtattttagtgttatttagaggttatttaaggcttatttagagtgttttagggcttatttaggcttattttagagtatttagaggttattcaagctctattttatggtattttagggcttaactagggattattttagtagtattttaggctatatttaagctattttagtgatattttagtcttattttaggctagtatttcagtactatttctaggctagtattttaaggctatttttacatattttaagcatattttaaagtattttagagctaattttacatattttaagcatattttagagctatttttggactagtatttcagtactatttttggactagtattttagggctaattttacatattttatctttagtttagtgttatttagagccatttggaaggcttaaattgtaaaatttcggccttaactagcatttatctaggtaaattcttcataaattttacgtgaattattgaccaaacaaatcatcaataaacggtaaataaatggtaaataagtcataaatatgtgataaatcataaataagtgatgaataaatcaaataagtgataaataagtggaacagagtgattttaccttgtttcgaagagtggaatatcattattagctttacaccagctgagtgctttattggtgctaacttttttattttctgtatcgtcgattttattcccgacgagtgcaaacgggaacgtatctgggcttttgggatcaatttgaatgagaaattccgacttccacgactcgatagactcgaacgtcttctgatttgtagtatcgtacactaacatacagccgtcagctcctctgtaaaacgccgttccaagactctggaaccgctcctgaccagctgtatcccatatctgaccattatgtaacagaatttattacctgcagagttacttccttatcatccacagttattcccatcgttaaaaaatcggctccaactacaaataaattaatttaattattcaaattattatttaattatttaatttttactaaatttttcgtaaaattatttctaaatattcccaaaatatttctaaatattcccaaaatatttctaaattagctaaattaagggtaaaattagggataaataatcccaaattaggagtaaattaaagctaaataaagagtaaattaaggataattttggataaaaggagaaagaatacttgtggctctgtattggttggtgaatcttttattgatgaattggttcatgagtgaagtcttgcctactctaaaaatgggtaaatttaactaatttctgtgttacccgctatcgcctaaaattattattttaagtataggttttcttctaggcatttttaccacaaagatttaatttctactaagtcacatacacacaacactatattccactttccacctatcacacattctcactttcaattattttaacttcctcactttaaattattttaacttcctcactttaaattattttaacttcctcactttaaattattttaattaaaatttcgttatttacgaatttttgacatttccgagtaacttaaaaacacgacatcaactccccaaatacctcctaatacactaattatagatatacgataattatcccattaatacactagttatacctaatatgctaattatcccattaatacaataattatagatatacgataattatcccattaatatgctaattatcccattaatatgctaattatagatattatatggtagataatgtggaatttgagtatattatattttattgaaggttggttcgattttgtcgagtaggtgtttgaggtggttgaagagcggatcatcggtgtttagatgcgctgtgtaagttttaagtgcgaatttaaagtgttgcaagaacacgataaacttctttaaatagttccaggcgtactggcccaggccgttggagtctctcagtactgcgaatctaccgtgtgtgaagtagtcacacatgtaagaattgttaaacgtgacgtttagcgttttcacgcggttaaatttactgtcaagctggacaactttgcagaaattgtcctctatcacggggaccaaatcggcagtcaagtcaaactcttgcaggctcagctccaggtcctggaatgtcccaatctcacccacaactccattcacattcatgtaatcatttgtacatccaattgtgtgttctgtgttataaatgtttctctggtggtacaggctaaaaaatgtttgttccccgggttttaccatatcctgaggtaatttaccgttcacaggttttacggggttagtgctggcaccctgtggttcctgggtcacctcactggtcttcgaactgctgtaacaactagtcaaatatttcctggtgattagaagaacgatttggttgtagtagttgatgtgttgttgaagttgctgatgtcttgggaggagtgggaaggtgtcgggaaatgccacggggtacgagtgacctatagcaccacccagggtaccaggggccacgctaattgtattctttacatttggttcattagttccgtttctcagctttgtactcaccagtctacgtatgttcaacacgttactcatctccttcttacggtaaattaatagtgatagtatctccaacattctcaaactcacatctgtgctactaatctccgagttaattatctcagagttatttacatctgagtaaataatttccgagttgctcatttccgagttgctcatttccgagttgtgtgaaagggtggaatgttcgggctggtgtaggagttgtgtgagtttggaagtttgtatgagtttggccaaaagtatgttggaggggtggatgtcgcgggtcagcaatgccagctcgtagcagccccggattaacccattctcatccactaggccacaactcaccaatatctccaacattatccttatcagcattaccacagtattctccacgttagaagtattaccctgggttactccgttaaatgagttatccaagtttactgagctatcctgggctaattttccgttaactaagtcaccatgtgtgtgtgattgtgtgtgacagtagaagttgagcgagttattcataattgatgataatctctgtacaagtaacttaggttctatcactagtcttctgctgctgttgattaagtcatctcttacgtctacgtaatcttcgccttttctatttaggaactggaggtttaacggctgttgggtgtttgaccttattatcagcgtgtagaaggaggacagaattgtcagtagtatggacagattaatattattggtatcagttttaagcgtcggtaaccgtgtgagcagcagttgtttaattctttttctgggaattgaccagaagatgacatgtcctgagaggtcaaatcctctcctgccgcagcgtcctgacatctgtttatacatgagcggcgtgagttcatagttgtctccgcaaaataacacagacttgcacgggacgttaatcccaaacgccagtgatttggaacttataataacgttcaaaaatcccagcctcagcaacgtctcagtgagaatagtaaacttgtgcggtaacccctcatggtgtattcctattcctctctttaacgcttcgataaataggtttgagttcttcctgttacttatactgtttgctgctacgttgatgaatttatcaatctcgtcagtgtagttgatgtatattttcctgttataaaagtagaattcggggtcatagtcctgagacacgtctacaggctccactggcacttctaattccatgttacttgttattccctccaattctctctgctcctttgtggcactcgctcgcatcttcttttcagactcgtattgacggagctgcatctgatacttgtccatcctcgccttgtttgccatcttagtcgccaaggttctctcgggtgttccaaagaacttttcccactgtaagcgtagcagcagtttagtaacacttgttagcacgtggtccatcttattcctatccaagatgaagactagacatgggagtcttctactactctgcagcctcttgagcatctcgtaaaatgacctctcattcagatactccaagtaatccatgtcatccaataatccaaacacatctctctcttccattcgctctctaacactttccaccgtttcctcattcacaccatgttctacatctttctccacatctttatctacgatgtggttgacgtggttcacacgattaatctgagtaatctgattgttcaaattgtgtaaaagaggataaagtttatgtttcgcgtctaaatcacccgagtgtgtggtggtgggtaataaattaacgtaatgtaaaactctgtcataggtagcagagttgatattaccagcctggatttgacctgtcaattcaacctttaacgcctgtaaataatatctatactgtctctttgttatcagcgtacatccctcaaagtagttaccaggcattaaatacatcatagaatttaatatctcagaatttgctgtattaacgttaactcccgatgtatcactcaggcttaatatgagcgactgtacgagtagataacaatcgtatggcgtgagataaacatcgtttgggaacccgttgttatataaatcattatatgacatacagcacactggattaaacgccattaacctgtttttcctatttacagaattttccgagtatgtggccgggaaatatacttcaagtttcaagtccgaaaacctctcatcaaacattataaaatggactttattactctttttgtctaactggtcgaggtcctgacccatatcaccctgatttaccgtgttctgtggatttaccgtgttaccctgatttaccgtgttaccctcatttatgttactctgacccatattacccttatttaccatattaccttcatttacagtgttttgcggattgattggtgagttattgtatgttgtgatgttggatagccattggtggaactgtgtggcgttaccgatggtggcggacagtgcgatgaatgggcagggtatcaggtgaatgcatcgttctaaaaacgagccaagttccaaatctgcaatgcaatgcacttcgtcaaagattacatattctaatctgcttatgaaattagcctcgctgttcctcattgagatgagtaacttctcgagcactgtgggcactgttaccaggatttggcttgagtaccacttgggatcgtggaacttttccagaaacgtggaacttaacgccaggttcgggttcgtatagtatttggagctgaatctggcggtaatttcataagttacctggagtgccagggcagtattaggtgctacgtaaatgaccatcccctggtcatccagcctcaaaacctgttccattgcgtagtagcagatgtaagttttacccgtagacgttggtgccactactaacgcagattctttagcgtcaacaatgtccagtaacatcttctgccatgcgtcgggtctaaaaagtaccctcgggtcatttgtgcttcccaaagtcctctcaaacacgtctcccatgtaacataacatgtagtcgtactcagtaccttcaaatattgcaaagtcccatacctcatgatccttttttaccctgtccatttccctctcagtgattagatttagctctgattttcccttctcactgattaggtttggctctggattattctgttttgagcctttctttttaccatccacgggcttaattctgttaaaagtgtcagttgattccctgctcacttgtgtattaaaattgttaaccaaattctttgcataactttgaaagttaagttggtataaaaatgtgtacaacagcagaacaatttccctcgtcataatctcactgtagtgttgataataaatgaaaataagcctcagcaaaattgtcaacagcctcctaaaagaattcggatgattaataacaattcttaatctgtatgatgagaaacagttgtatagcctttgtatcatcttgtagatgtacaggagttgcacatttcttgttgagaggactcctttgacccacttgaaatcggtcagaaggtctacagctctgtttggaccatctgtgctgtcaagtatatttgtgtacatgtcatcaaatgatttatcattgttaaataactgcgccagcttattttctaacctcaccaaagtgttattatcactctccagcctcttattctcctgcatctccacgttcttcaacttcatcaactcaaccttactcaatctgtcattcttactcaatctgtcacccttactcaatctgtcattcttactcaatctatcaatcttcttgttaacatttttcttttccttgtgatttgtgtgtttggttgattttcccaattctctccctgtggatttgattgacaggagtttggaatagtttaccaggttgacatacttgatatgtagccagaaatgctccaatttaataacaattgggtgatgaaggttactggagcctaaatactttgacagcaaaaatgagaaactcgactgattttgtatacttctccttgtgtatttggttaagtcttgctgcttctccttgaggtcaaagttgatatggaagtcaatacactccatacgctctgaaatactgcaaggatcgcgccagaaatgcttactaaacatcactaactcatccaccgatttcgcccttgtccacttcaagtccttcctctcaaacttgtaatacaaatttataaacgaattattcacatacaaatatttactcccaatgtcccccaaatattccgtagatcctgttacatcagttttagcatctgttgtaccataggttgtaggatctgttatagaatctgttgtaccataggttgtaggatctgttatagaatctgttgtaccataggttgtaggatcagttttagcatctgttgtaccataggtagtggtatctgttgtgacatcctcacgggaaccattgatgctattggcattggtatgattaagctgtgtgatttcactctttacagtggttacgggattagtcaactgatatgtgagataatttaatttgattggaaagaattttacagctttatcccctgtgaagtgttgaaaaacagagtcaaattcctttaccacattctggcccagatttaggaaagatccgtcaacttggtcctcatgtgcttgtgcatactgtaccaacaagtacaaaatcgtactaaacaaattcccgtcaaatatgtcattcacagtcctatcgaaattatctaacttagctgaatcgcccatagtatacaacgagttaaacagtggataagagcagtagcacatgaaatctatagtggctgcgatatcttcagtgtaaaagtcccagtctgaaacatcaactctttttgtacagcgttccctcagggatacattttccagcatataattatgtaccagcaggcatttaaacgttaatatgaatagttgattctgcgccttttcctcttctgttcccgtttccactgagttgtacgtctctgaacggttaattaactttacaaactcaaccaagtaattacacactaccaaatcacgcacatggattcggcgatccatcaccttactcacttccccgtacaatttctctaccacattctccgtacccactttgtcatctttattccccgtagtattatctttattctccgtagtattatctttattctcctcagttgtggtgttgagagagtacaactgtgtggtcagtatgagtgactgttgatgtattgatgtgggaatgtgagtattggatgagaaagagatgaaagctttaaaatcctcagaatgtcttgtgatatcaaaaaaatatgctacagataaactatttgataaactctgtgaaattagagtgtggaccacgctggagtaccgatcaatttttacctggttagccaagtattccaagtatttcgcttgattttgtaaattctccttacctttacagggtaaatccaatagttcatatacagtgtcaaaaatgtatacaaatgatgaaccgtcttctagtagtatacatgttggctcattttcagccaagtattgctggaatttagcatcgttaatccagttatcaaatactaaaaacggcacattattttgtttaaaatgacatagcaacaattgcctataatacaagtaaccatcaaaaaacgtttcctcctcatctccgaccacatgagtcggatcaaacacctttttaaacacctcaaaaaatactaacttgaccgtaccacatctcataaaattcttgagaaatctgtcaactctgtaggtaaactgtagagtatgtggaccgttagaaaagtccagtaaattatgtccctgtttatgcgccatacaacaaatgtaaactattaacgattctgcatggattaggcatacggtatcactaactcctaaggatgaaaagatgcctaggtattctctggagcacagagagtgccagagcattagtcttttctgaggtgagatttcattattatctaaaattgagcaaaccgcttgagaatttattactccaaaggtatttgtacccaggccgtcactgaatccttcattcaaagttgctgtgctcagattatcagtgaaagtgctaactccgtcactgaaggtgtttgatatggaaaaatcatagggtaaatcggcagtatgttctattttctggacagattccactatcttcaaatcgttatcgtactttaaaatcgcttcatctccactcacctcgttcgatgagtaaccatacggagaattctccattttttatggacccaattattaagttacaatttagttaaattaacatcatagaaatgattattttacagttacaaatgagaatttgtttcgagttaatcgcgggattttaacctttaaatccaggttcagaaaattaatctagaacaaacatttataaaatcaagatttaattttttaaaatacaaaattacaaaaatatttttctaattaccagagacaggtcagcaaccctatccaaaataattaaatcacaattatcacaaattaaattgtccaaaacacctttaaaatttattttaagcattttttcaattaatttaactttatttcagctaaatgtgattttattttttgttgattccactccattctcattcaacatcatacgctcccctgccatttctggatcccaattttatcaattttttcaaacccaaatttcccggaatttataattataatgttaatttaattcataaattattagttattgtggaatttatactatgaatcttagatttcggaatttattctaaatttaccattatctacactgttacagagggagaatatttattttattaaattataaaggtaaatatttacacattaattaaatatattaaaatttggatacatctcctactaaatttagcatctcctgaactaaccaatttaattcatattttaagtcaaatttatcattaaatttgataaaaattattaattttaaattataagataaaatgtgtagagataaaaataaattctgattatttttgaaaccgtattgggtattcttaggaacattgaaactattcccctggctcattataattatttgtttaattttaattttaaagatatgttggatatttcatttcaagatttttaataactggatagaattttatccatagttttaatcaatagtttgaatgtgtttataatattttttagtttattacagtttttgaaaatgtaccatagtttgtaatataattttatttcttattagttggagtttagatctctcatctaaccgttgattatcaaatgaagttaaaccatatgattcctcaatatcaaattctatcaacacaaaatcctattaacctggaatcgaatatcattaatctgctatagaattccatctgttgtatcgcataaaaatgtttgagggtttggtgaagcgtttgttggatacgtatcttgctccgtatgttgaggggattacgcaaaatttacaaatggcagtatggtctgggaacatctcattagaaaatctaaccctaaaaaacgacatagtctcaagattagcactgccgtttcatgatgtttcggggaaaatcggtagtatgaatattagaattccctggaccagtttaggaaccacgccaatcaagattgttatagactcagtttacatttgtatagataacagatcaaatgaaaaaacggactctgaaatcttggcacacttgagaaagaagaaaaataacctaatcagcatactggagcatgagtattacgagctggcaaacttacaatctgaaggcaaactaagctcatcatacatcattaaactgtcacaaaagattttaaataacatacaaattgattttactaacatacacttacagttttttgatgagcacagctcatttgcctttaagattgactcgatttttgtcagaaaatcaaaggctgacgagagtaaaaagagcctgagattaaagacaaatgaagagttcagagaagaacctatcacacacgtttgctcactcctgggactctcaatttatgaaaccaacttcaaccttcccaaatcacaagtctcctcaaactcaatcctacaactcattgccaaccactctgaacgtgaaaattctgaggatagtgagacgggggactacatagggttgttgatgttggaacctctgtcgtttagattatatttggcaataaatgcgagaaacaaatccatctatgcttcactgtgtattgggtcaattgtgccaagtcactcgaaaatatcagaaactgtgattaactataccaattacataaagtcaaacattagtaatttgaccaacaaaataggtaaaaaggatcaaacggacgtaaatactaatgagagagaggacagattgaagatagtgttgacgagtgatgtgattcgaacatttacgaagatgtgggttgatataaacatggtacgcaaaagaggaaagagaattctattatcaaagtcaaatgaagttaaactggatccagaatcactcaaaaccaccaccaaagcagagttcatcaaattatacaccaaacataaactatcaggatcccccgggttacagagtaccaccgacaaccctgttgacttagaagagttggagagattacaggatataattgatttggtaccagcgcgttacatagcaagatggaagtttgcatgtaagagaagaagctcagctacggtagtgacaaaggagaataaatcctggttcaaatgggctaaaaatatcgtcaccactacgtataataattatcagtctgggaaacagcaagatacaagtgatccaggtaaacctgaatcaccagaaaaggagccgagaaagtcattcagacaatcatttttctcccttaacaattcgttcaataattcattaactcctggtaaaagtgaaaataaggcacaggaacaacaggatcaaccagaaaataacgggaatcaaatccctatgatagtggagaatttacctggcggactagtgttaacggaagatgaaattaaaatgatccaggaaaccattagtctagatgaattatttgaagactcctttacaacaagttcttactattttgagtcagttttaccatcgttccagttcatcatacaattgagtcccggcactaaccatgctgctgaatccgaagtcatcttggtggacatacagaatttacagagtaggttatatttacatgcggtgatggatatgaaggacaaggacaggtatgaagggtatttcgatttaaacctggactcatttgatgtcatcatgagaaacaagaagatcatgacattctcacaacagaatataccattccaatcaatcatagacacatacattgagccaacagattctctagttgtcagtgatttgtcagacaaattggctcagaatccaggaaaatcgggcttgcaacagtctaacagattagagttaatacagtcaataagtgtgactgaaagatgcataatgaatttgagaatatatcacaagataatggagaaaggaaatgtagtagttgtaaacggagaattaagaccgatagaaactaacattttccccgaactgataccagttttctttgacctaatctctctgtttcatccaattaaacaaattttcaatcaagatcacagtctagacaattataatacaacttttgcaacgcccacctatttaggacctaccgatttgggacctacggatttaggacctattgataaggaaccagaatttgatgagttaactagtgaattaaatagtgaattgaatagtgaattaactagtgaattaactagtgaattaactagtgaattaactagtgaattaaatagtgaattgaatggagatgaattattgagtgacagagattcggtacatttcccatcagcagaagttgacaggatccaattcatcaactttgacataaagttcagtgcaccaattttgattatatattacgaggaaaagaggatagatttttactttggaactcttttattcaagtctaacggagactgtcaaataggccacattgatggaactctggagctgaaacagacccaaatcacgtgtaattatatggagaaatcttataatttcctgaggccgctgccggtaaagatccactatgacgtggatatgaagaatgaacagattaacctgaacgtgattttcgaggagattttcgcacaacttgaacccatggcaacgagtatactattcaaagtaccaaatgagattatcaagatcgtgttaaataatatggacagaagtgatacttgtgggacagacccgataacccatgtaaataaaagtgatgtcagaaataagttgaaacagtataaaataagctctaatgtgcttattagacactcgggtttctcagtgtcaaacttaaatctgcacgagatattcaagctggacatgtacaatgtggcagttaaaatgtcatacacactgctgaattttaactttagcctgtcactggagtcgtttatcatttcaaatccaaccactaaaataccacttttcaagactaaaaataatttgtcaacctacacaagcgttgacccctttggatcgggtgaagttccggttgacttagttggtttggataatttgaatatttcacagtatcaatcggagccagataagcaaacgagtgacggagttgaagacttggctgttcaactggagcgaatgagctcattggacaaagttgaggatgacactgtagaagagtatgtagacgccgtagaagatgtatcaaagtcactagacctggaaattactactagaatagatgagaataagttatataatgtggttaatgcgcagataattgagatggaggggaattgggagtactctacgattaagcttattgtggacgggtttcaggagtacaaggacatattcagtaaccaaataactcaaaccacactaacaagcttaacaacgacgtttaaaaactttaaggataaatttatttttccaaatgcgaacttagcgagtcagggcgatgccgggaggtcccaaactcctggcgccaattcaacatctgccgatgatattgaaggatttttgatagataaagatttacccgtgttgactagtgagttgaagaagttggaagttgtaacaaagtgtaaactaataatcaaaggagcttcagtgctgtttaataactccaacggcgacgtcatcgcgaaactctgtgtaggaaaaatactttttaagttgaataaatttcaaaatggtgaaaagattatcaagttgtcaattcaaactgggaaattatatttcggaggccggtgcattttgtcacatctaaccaattatgaaacttctgctccaaattctggtacaaattctggtacaaattctgctccaaattctggtacaaattccgctccaatttcccatccgaactcagactcttcttattcctttagtgataaccaaagtgacgaagaggtggaaaataatttattggacctgaagttgaaatgttacaacacgaaggaagttccgtatagcatatgtttccaaggaaaagtggacagagtagtgtttgtatattttcagcaagatattaacaggtttttggaatattttgatgacgggattctgagtgtgtttttaagcagatcatatcacagagttgtgcagagagctgatgaaatttacttcttttatcacttctcaatcacttcgccgattttcattttacccgaaaataaagccgctatcccagattgtaaacgacactacaaacaacaaataccaccaggatcaactttaccactatacaacatagataaatgttatcaaatagaaggggttagtgacggagttactgatggagttagtagtggagttagtgaaggagttactggtggagttagtgataaattggataatgagttactgtatagtaagcatgtggacgacattatgaacatatcaaatgtggtggatttgtggtattttggatcgtatatactgtttgagttgggacatttggagtttagaaacagttacagtaagttatttgaaacctacaagagcacgatattcctaaaaatgctaggcacaaaggcacaaatcatggaacagaaggatggaacaatgaatataagtggagtgatcctagacccaacagacctgaaagtatgcacaagaggaagagatttgatggagattggagtagacagtaaggcgctagtgacaaatttgaccaggaaccagatgacatttctgatcgacgtgtttaatgagaatatcggaggagcttcatatatgatcacctcagagagtaataattttacacagaactttccaaccaaaaatgagtcccgttatcttatcaggttatcgattaataagctacaattttactgctacaataattctcaaacttcgaacacaggcggccagatttctagtactaaccacaccaccaattcaggtattattccgcttggattatttgagtttaatgacataacttgttgtctggactatgcgtctaataatgtgaagctggtttcgtattaccagtttgggttcataagtaagtctctgacgataacagacttgagagtgaacagctttaacaagtataaaacccttttaaagtgcaataacgaggatgaatatagtggagaggacatgatagtgttggaggatggagatgaaattgtcaactcagtcaacggattactctttgagtggttaaagaattataaaagtaaaactgggaatgattttttcaaaatcgatccgagcaactttactaaaacaaagtcacaaggtgttaactttgttgacggagactcagaggccaggttacagtatcacggaattaaatgtgtgatttcaacagacccagaggaaagttttatcgatgtaatagtctcaaagagtgagataccgctactgtttgtgtacttttttgacctagtgaggttcttctcattgtcgtacggcacttcgtcaatgtcactgttccccaaaatatcacaagtacccctttaaacaattataaataattattttagtctaaaaattttttaggtaaatgttgagcgagtttacatattgaatttgctcgttagtaagagtaagtttatatcctttagtaagatggataagctggactcaccgaggctagagctggtgacggactttttgttacaaatgcacgttcacggaaactcgttcaagttcacgaaacttgatatcattgactgtctactctccagagtttatccaaacactaatatcaagcaggtgctgtgcagtaactttttaatgtacggtaagggacattacctgtctgaagtatcctctaagatgtttttccagttcacaattccgcagattaatttactactttacacgagggatttgagcattatcatttactgctttaaaagtatgttcacagatggaccaagtgtgatcccaattaagctggtgaataatcagctaattgacgataacacgagcaagttcctgacactgtcatttgacatcaaggggattgaaatgatgttctacgatgacttgaagaagagtatagtacctctggtcaagtttacagtggagtcggaaaagttggaaatattaaatttacccatagaaaagaggtactcgctaattcgatgtaactgtcatttgtactactttaacacgaatgtcggagactgggagccgttcatagagaagtttattttcaacttggagtacataacaaacccgactggcaaatcaactgaaatgatgaagaaaaataggataactaaccagattaacaagcctaacagagtgagtgacgataacacatggaaggattttgtagccgaatatcaactgaagatcacgtgtaatagtaatttactcgtcaacataacaccaaacctgtgccaactcctgcaatacttcctaccaatcctcaaatctaacctccagtcaccatgcctaaataacccaaatattaatcaatcagatgattctactaaggtaaacggtactgatggcactattggtcctgatggcactattggtgctcttggacctaataatcagtctgaagaggatgacattgaaatgtataattatagatatgtaaatctgacgaattacgagtattacgggtttataatggatttaaccaagagtagaagtgaggcttttagtgacgtgttgcacatagtgactactacaaacccgaaacagctggattcattggtgaatcagctccacaaggaggttagcagtaacgattactgcatatacttgataacaaagccgccaaaatatttgttaaaacacctctcaaaggagctgaactgtagtgaacagttggtggaaacagatttgttgacaacgacttcggtgttcagaacaatttcaaacctgtcaagcatatcatctcacggatttaacaaacacagtgtttacaaggagatgaataggagtacgttatttaacaacggaacagtgctgagtaacatacccttgtcaaagaactgcacagtactactgtcagttccagtgaaggatattaacatgtacagcatggcggaaacgaatatgggagaaccagaacaagcccaagacgacgaagtcaacgatgttctcaccaacatagtaaccacaaacaccactgaacacagtgccgaaagctcgagtgtgagtggcacagatttgagcactagtagacccagtagcagtgctttcaacactaatagactcagtagcagtggtttgaacagtaatagaccaagtagcagcgctttgaacacgaatagactgtcaaatagtgtagttggagttccaaacagtactgcgagatttagtaacctaagtgttgaaactagcggaacagtgggaactggcgtcatgggaataagcaggaataacagagcaacaaatgtgtcgaatacaacttcaaataataacatcatatgccaggtgttgacgccacatccgtcgcataaattattgttattcacgtctacggtgaggatatataataagtcgggaatgcccatagtcatgtgcttccttgacagaacttttaaccagcagtacatgtataacctaaatcacaggacaattccgtgtaacctcttaaaccaaagtaatatggataattttaagcagtataccacgaataacatttatactgggctttcagaggtacaaaagtatactcaaaacaagggcattgaggatcaagacggttactacgtagtgatcccaaatgattacatgttatcagtgccagaaaacgtattcataacggattcccagacgatcttttcatttaaaccactgtacagacagcatacgtatgatatcttcagtccaagcaacgttgatttccgaagtaaatcgagtgaaaatttattaaaagattacaacaagttggttaataaaagtggctggtcaaaactgatagatacgtcacatcacgtgggcacaagactgagacagtgctactgtccagaattaaccaagaacgggtttatctactttgtagtcagtgtcaatcataaaaggtcgtcactcccagcaaacgtaaacgtgtcagaggttgttatttacccgtcaatatcagtgatgaacacactaccactagacctagatctcaagctgctatataaagattacaacttgaacagttcaaagtacggcgggaaagatgatcacaattcgagaaaggaggaagttgtatacaaacttaataataagagtatactacacatttactcagtgcctccaaacgagtctctatctctgtacctaaagctttgtaagactgaaaaaccatattcaggcagatcaaacagggacagtggattttcaacggattggtgtagtaggattgacaatatctatggaaacagtgatactaaaactacgtttaacatgatggtaaactcaagtttactggagctagagttgattcggtttccaggagcactaccggtaaataatttatgtatacaaggacatttaagtttgataattaatgcgccatggatttttattgacagaacaggcctctctttagttccacagcatttcaacaggatattcacaacaaacaacttgtcattcctgtacgataacaataataataattataagttgatatcactgaataatccagtccagtctacaggaagacacgcacggtacccggatatttatgctccttccggtcctaggtacagttccagcagcagccacatccatgaacgccaagaggatcttattgacgagaatgaatatgacattaaaatgccaattatcggaggttacgtatatacgacaattgatattaaggggaaaaatcattgcgtgtgcttaattacggagaaggtgtacataccaggtctggcccacatttccagtaaggtgacttcagcactcccagagtatttatttacaaataatttaaaggaagttgtacaccttagaaaagattccagaacacagagcatgcaaattatgcccagttccacgcagtctatctcacatttgacgaattttaacaacggagcaagtccgtcgtcaggaaatagagaagactcgagtgaaaattacattgagcttaaggtgggaatggagacgtgctggagtaacgtgatttacctcaacgagctttacagtggagagacattcatgtcactattaaaggagaacagttccaagtcattagtttacaacatcacaatcataccgaaaaatggaataaaatacatctcaattaatccaatcctaacacccacgccaacaatgttaacatctggagataaggataatgacacaagaggttacttactttacaacaattgcagtgtgattaaggtggtgatgataaggacttttcataaaagtgatatcaggaatgggtcctgtttcacagcaaaatacggccaagtggtaaatttcggttggccaaatccatttgtacataaaaccaagcttatacaagtgttactgtggctagacaagaatactgtggcacctagtaaaccgctgatattcaatttctcaactccttccttcaggtatagaagaattgaacttaccactccagaataccacaccaactatagcattacaatactggctgaaaatagaatcgactattacattatcatcattaaccccttcgaaaataactcattgaccggaaacaactcaatgaatttgaataacacaatgaatgtgagtaacacgacgaatgtgaataacatgacgaatccaaatacgaatccaggtggtttgggtaaaaaagaagtggaaaaggcagatgtggaggaaattgatgacagtttattacttgacgggaataacttgaaggattcgaaggaggaagatttacaagtgtttgaagaggagattaagagttatcaagtgatattacaaatcaaccagattggggtgagtatagtgtctcaaagtttgcatgaggagttgttctttctagagatgggcggcatcatgagtttgttcatgtgtaaggaggataaccagaggctagaattgaagattttagatgtgcagctggataatcagtcggattcagaaataggaagaacaatcttggtaaatcgatcaaaagttgagaataaagacgcaagtttcctccaagtgtacgttgacagacctttcagtaactgtaaagacatttcaatcaagaagatgttcatatccctggatgatctccaggtggatttcaacgatttgttgttcacaaaaatatttaactactacagagagtgcatgattaacctgaataattacagcggacacggttacgatttctctagcgacaacatggagattgggaataaaatgtcaaaatttgataataaaattaatattgacatgatagaaaagtggttaaacatggaaaatgaatcaccaaccagcagcatcgacgttaacgtgaagttgccaagaagtataagcatagactatttatacattgaggcgtttaatttaatggtatggtgttgtttcgaacttgacaaattacacatgctgggtgatttgctgagagtaggaattaggatcctgagtatatctagaaacttccaactcatgggagcgccactaagtttccaacgagagtacatcagcgttaacaggacaagcatattcacattctacgagcaaatgaaggagaaatacttacaggcatgtttatcgtcaatagtaggcatcctgggatatagtaacttgttaaacataccaaggctgccaataactgttggaaagtgtacactggagattgcggcagacgctgtagactcagtttccacaaacttaggcatgattttatccaaattcacctttgacaaggattatatcaagagaagaacaacacacagagatgtcacgagtatgaaggatggtatatttagtgcaggaaagagtataggcgaggggctctttagtctcacaaatattataacgaagccaattgaaggagctcagaaagaaggcatgggcggatttatcaagggcctaggaaaaggaattgtaggttccatagtcaaacctattgacaaggttggaatagctgtttctcaagtctccaagggaatcaaggccaacattaacaaggaggaaaagtatgcgatagagccctgtaggaaaccccgaatgctttggggcgagttctctcaaattcgaacctactccacagtggacgctgaaattaaatacgtacttggcaccaaatattccaaatacattatggactgtctggtcattttaaaacaagttaacaacggaaagtacattgcgctcctattttatccatcgaaaatctatctcgtcgacttaatcaataacccaaatcaaagtaccatcacattagcataataattttttaggcaaaaaaccctttacaatgtggaaattacaaatttctaacatcaccgacgtcagagcctcatctcacggagttatcatcaagtaaaaaatttaccctaacctgtccaactctttctacttaatcttactcaatttaccttaactaaccctatcattaacttacttactcaatttaccttagataaccttattttctcatttattcaactcattatatcatttttaggtgtggtactgagcaatatcaagtaccttgtacgagagcggagatgataaataacatttacgtttgcttccaaagatctattaaacattcttcgtctcaactcaccatcggtcctgaacttttcaccaattaacacattttaatttatttcaacattattcatgctaatgttatctaataccataagttatttctagtaaaatcagtagattccatcgattattcacaccataccattggatacacatgttctatacacatttgtgatttccatttttaaaatgtgataatgatttatttctttaaatatatatttttttcatttgttttatccaggagtttagcagttagtcagactaaatcgaagattaatatcccatacatatcacctgttaagaacaacagtaaaaagtacgcttaacaattaatgtgtattataatatctgttttaggggtactgttatactcgatggttctactgatggcaacggcgaactcccttttgttgaaatcacaaacgcagatggctatttttacaaatctccacaaggtacatatatttatgaatttaaaaattatttaactttctaactctatttatattttcagagtataaagatacttcatatgctaagagggaacgagaacttgaagaactacagtctaagaatatgaaccactttgactttcttaatccactaatcggaaacctcactaacagaatttagcaaaataaattaaattataaaatggaaatatactttaattaggaaaaagttacagagattttgtttttttaaagtaatattttaagtttaatggtatgtaaaaaactgcaaacattttgttaggctttaaacttatttacacattcaattattgattgagagtttgcagctcccatcttcagtgcagcatatgaaggcatgcattttttatcaaaggcctctgtcatgtaagaagaaaatttatccatacccatcgctaaaacagcaactacctgaaagaacattagttaataaaggtttacatttttatccttaacgtagtaaactgtgaatttgttagagtcgacatcaccctcaaatactaactcctcagttccatcaataacaccggcaaatctgaacaatttaaaattatgtgtaaaaaattctgaataagaagtacctaaacccggttttgaaaaaatttgaccagaagaaggggatcatgtccatctttgcaggtttaccaaccatgttactggctgcaacacgtccatgctgaagtgcaacattccagtgttttactgaaatcggtttccctaaaattattataacaatcgttagattaccagttctgtggtacgggtaactcactaagtccccagaggcaaacacatccttacaacccttacatctataatctttataacttgttaatagtacctgaaagcttcatccactaaaacagttccatttttagccaattgcgcacacggtaagagagacgtatcaactctggtgcccacgccttcaataacagcatccgccttcagggtcgtattattatccaaaaccacttcattaatcttgtttccattcaaactaacgtaaatttactaattattacagttacttgtattttttaaccgtgcatttgggtaggaattttacaccgtttttttccattaatttggccacaactcctccaacccttttaccaactattgtttccaaaggtgtctcagtctgaaatttattgagtcacgaaaattttggttaatcgtattaactataccgaaatcgtagttacatacatttgttaaaactgtaacgttggctcctgtggatttaaggacagacgacagttcacagcctatgaagttggctccaacaataacctaaatgataaataattcgattttaaggcctacgatgtttgcatttggtttaacaaactttgatagggattttaggtcatctatggttctgacggtgaaaaggttatcataatctttgttctgggatacaggtaatctagcagaaaaattgccagtagcaaccaagacctaaaattcaataaaattaatcttgttactttatcatatttcactgtagttccatcagacaatgtgactgtgtgatccttgtcgttgactagacgaactgattttccagagtaaaactcaatttgattatttttataaaactcttttgatcttagtgcctgttggtctggaactttatcatattctttactaaacgctttggataagtatggtcgatagtatggcaaatatttctcatcagcatacattagtatgcggcctaacaatattagaactaacaaaagtacctgtaaatcccttaagtcttagtgtttcagctgctgcatgtgctgatgcgcctcctccacaaattacgaaaactctattatctcttccattggttttatctctcagcatttccacttccagctggaaaattctattactttaggaacttaccggtaacggtgttggtggtagtaaggcgtatagtttatcgccctgtacaactggttcatatgttgctattccatccatacaaggtcctgataactattataatctcaaataatcaattttaaaatttatctacagaatgttaaatcataccgtttacacatgatccgtcacttaatttgaatttcgcattatgccagggacaaattagaagctcgtctgttacagctcctaaaacatttaaccacttgtttcagttaccatctataaatgatgcagaaaaatgtggacaagagcttcctgtaacatagaaattgcctttaatcttcgatactaaaactgtgtccttccctattaataacaatgaatacaaatgtaaattaccattataaactttaacttgtttagattctccatccttgaagtcggataaatttcccagttcaaccttattgaatccgttacagtaactcttggctaaattggttaataaaatcaaacatttggtaaaactaacattttagagaagtataagacaagtatgagattgataagaaggctggaactcctatataaaaagtactatcaaacttccagcctctattatttgtagagtttatggaaggataggtggtattccttgaaggtttatatgggcacaagttctttaaatttctgaatatagtcctctcgaaaaacttcattacaagaacaatgttttaataaaaatagcgtataaattttcttctaaatccacacatgatcacacgacatcttggaatatataaataaaaattttaaaatgagttatgaaacttatatttattttattcttgattatatattttagttttatagatatttccctttccatgaaatttaatggtaattccagttgtttggttcggattccatttcatttgttgaataatttctgctttataaagttcaaatcaatttttaatcccatgatgagttccactaaatcttctgaagtcactatcgacttaggtactttcctatttcttcttttattttatccttagaccctttctgttttaaacaatttgataaaaagggtataaattacataccttaccctaaagaatctttcgttgaaaaggttgttaatatataaactattttttatgttttaggttagagattctcttagaaatggctcagttttaagggacggatacgctccgttttgtaaacatttaattctcaaaaacttcactgatgccacttgtggatttatagaaattactgacaaaaattctaatctcctaaggtttgtttacagttatctcaaccttgttaggtcaggatatgtttcaagaaccgctaatgagcttcctgttctcagtagatggttttcaaagagtgaagtctcagattatgttaaaagagcagaatatctagatgtgattctatactccagagaacaagtcataaaggaatacaaagccatgaaaatttacgaagatgattccaaatttcaacatgattattacgtgatttcaataaagcctcaggacgtggatcatgaacttccaatgctaccaataacgtatttttccaacttaatttaatatttaatattatgacaaacgctcttattgaggagggaggcagtggagttcctattgatagagacaaagacaggaaaatagtaaaataaatatgcagttttattggaaaattaatcttctcatttattttctgatatatggtacattttacatctcttgatcaagatttttatcatttttttgttcattttgttgatcatgttgtttaatcatttcttccaggttcctgtaaaatttattagttggatttacagtaccttggtaatctccagttaggaaccctttctatagctccatcaaactcctcaggtagaaaattgaatggcggcgacttcaacttctcaagtactgcaaaggtcaaatcttcaggcgttgaagctgaggaggataatgcgatatttctagcagatccaactagttcttcagtaacatcattagagtcaaatacaagatatgatcttatatttctattcaaagctgcttccactagtcttttagcgttggatgacatcgtgcttccaactattaggactaaatccacaaattctgtaactttatggatagctgtttgcctattagtggttgcatagcaaattgatccacttggtattgtttctatttgtggatactttttaaccagagcttccttaatctctttacagtcatccagacttaaagttgtctgtgtaacgtaataaagcttagtcccttcaggatagtccaacttttcaacatcagccacgttctcgacgactgtcacagcttccggagcctcaccactcgttccaattatttcctctgaaaatttttaacagaatgaaacttacggtggtttttgtgccctattaaaacaattttatacccctctttggctttatttttaacgtaaacatggactttattcactaatgggcaggaggcatctatttctactaaattccttgtcttagcaagctcttttacttcaggcgagactccatgtgcagagtatattaaaacactattctctggaacaaggtttaaatcttctatgaatactacacccctggcctaaaatggtgataattaacatgactgttagtattttaataaaagtaccctcagacggttacaaacggcttcattatgtacaatttcatgttttacgtatattggtgggccaaacacccttaatgcttcctctactgttcttattgccctactaactccttcacagaaacctctaggctttactaagtacaccttcttaggtgtttgaggctcaatttctacaaattaacttatttttgattggaatcttaactaacctgctctaagtcgactaactcgacacacctctagccttccagggactctataacctttacataaatataccagaacattgatgaatactatacatgtaaacattaattttattaaattaaaatttaggtgtttgtggcgcctgcaaacatctgtagaatagcacgtagggcacatgtgtgtttgacggatctctggataggtcgtccacagcaaattcgtgcactggttttactaccgagtcatccactttattccaattttcaaatgtttccgaatcacagccaataaagtagtagtggcctgagttagtcgagtctcccgagtgtattattgacccgtagagtctgtactggaatccctcaataaacagctgagaatctatttttacagctttcaggaccttctgcgtctcgttgtagctccagttattgcgatttagtatgatgataaggtgtgatggaggtgaggctataatgttccacatgtgcgccttaacatccttattacagttgatgcagaagtatttattatctcccgaaagcacctctaccttagagaagttgtcaagcatttgctggaccgattttgccttgtttaagcttaatgagaagtcatatattgtctcctcattatctgagaaggattcacacctcaggcactttattctcctaaccactaatcctgcaaacactgacttccaaagctctagatccgggtcaatagcttctgaaattaaccttatagcctctgttacatcctgctgagagcttgtcaagttttctgaaaccattttaaacacgttcttgggtgatattgacctcttgcctgtcgtcttcatcttcctaaacagcttcaccagtgagttgaccatcttgttactattattagtttctctgaacttcaataggttatatataaacaacttcgtgtggcacagactctggagtagactgtttaggtaacaactgtttcccaggtttttcaatcctatcacctgacctgtatcaataaaatcatcctcactgtaaaccatgtaatcatcccgacctaattcgttaaatgtgtcataatttggctcttcttccatatcctcgtaataatgttcttgttcatccatttctctagtgttaaaatactgatccaaattcatctgtggtatgaacgtcgttatcttagtccaaagccccttatttgccgagtcgttaaagaacttgtacaactctccgctgtttgcactagaggctgaagtatacaggtgcgtatcatccagaggctttaatgttgtgaaatttcccagtatcttatacagctcagtcaccacaattactatttccatattcactccctcctttattcttgtccacagaaagtggcacttccacaaaaaattacacaggctattcaaaatcattccgtttttatacaatgtagcaactatgatattatcagagggcagttgggctgtgttttgcataggttgattgcgatgcgactctgggtttaggagtaacgttgtctgcaacagtgagtttagtgagtttattgggcatgaacaccttgccaagcatattcttaaacagttttccattatatctagcctgatctttgtttcaccagacattaagtgattatcataactcattgaggtcagtttcagtattgtattaagtgtggacacgaataatcttgagaatggtgagcttggacttgtcaccttccatggtataacacacactaggcaccacaaatccaacagatctctctctgtgaagttgtacagtatcttgtacagcacagtttccagaatatcctcgtctctggtaaaatccatggaactgtttcttccactattcctgtaactatttctcgacgacattatgctttctcttctaatgctgttcctgtttgacacattagtactttcgtgaggacttgcctcactgcttgcgatggtaataacgtactccaagtgattattcacgtttgccttgtggttcagtgcaaacaagaagaattgggaaagtagaaccatctgaccattcgggaatggatacaagtcccttaccttttccaacaacatgaacgggtacttctttgtctccaaatcctctttcgagtttatccagtgaagcagcacttccattatattaacatttggtattgttttgggcatatcataccacagcatgcacaactgttccctcagcatgctgtttgggaggttgaacacactcgacacttttgttcgttccagcaatatctttaaaatgtacaaagtttctattttacctgacatacaactatctcttagtgtactaatcggctcctgtccacttgaatacatcaagtggccttgagagtttattgagtatggtacgagagttgatatctcagaccttgaaccaaatgttgacttgtatgaaagcaacaacttcaggaaatacactcctattgaatcgtctatcactggtgtgaacagtgcgcttaaatagtccaccttaaacaggctaacaaactcttctgggtgaaatgagagtgcgcataacatcaatctaaccacaaactgtctcaccttgtgtgtttctctcagaaatgtaactaagaagtggataatctggttcatcatatgtgtgtttgttatacatattgcctctgtaaagtactttattaacgtctcttcactgtggctactgctcagtattattgatctgagtttcttcaagtcagtctcctttaccacctcgtttccactattttccttaactgagaaaaccgaaaaggggttatagtcaatgtaattactgtagttgatcgtgtttgacgtatgaaagtttgtaaactcagtaccatagcgataagcataactcctgccataatctcttgttgcatcattatttaagtatgttgatgtattgaacaattttctatctctataaacttcatttttacttggaattctctttgcgcctatgttttgtaaatcaaaagggttattttctgacaaagttggtgtcagtcctgtattcaaactatctccaactggtatctctttaattggttcaacgatcttcatcttatttaaatgatccacggtatgtattatgtcggagtggaattttacagtatcagttgttgttactgaattcaactcagtttgagttccactcaaaacattgtttactgcggtaacttgataattcggcttatcttctaatttttctactgaattcaatgggtctaaaaccttatcatctttaacctcatatattttttctccctggtcttgattagaattgatgatttcagaattatcattctgttcaagaggtgtattatttgtttgatcctgaactgctttctttagttttgattgctccaaagatgcggttgatgtcttcaggctcagactatgtaatttgtttagtattgaaacattatcttcagtctctgaaaaaatgtcactgattgtttcaattttatcttcacgagaatcggatttatcatctccaactaccttatgtacatattcttcataggggtcgaatgctgctctttcttctagaatttgttttgatatatattttgacgtgtagttatttactgaatagggcctcgtgtttatatgattccagagcttggttgacctttcaagtatgtatgtatttgtattttctccattcaaataattatccatacccgtgtagttttctggtaagtttattctgttggaaaacagatgtttcttttgctggttatctggattctcgtgggagggatgaaaggcttgactcctattattatccatttatcaattttatattatccattttaatcccagtttttaaaataagttggtctaattaaaatttattataaattatacaactgcgtgatttttaaaatactattttaaaactacaaaatatgaactaaaatactttttatgcagcaaaaccttcaaaatagtgcataaatttaaatttaattaaaatttaaaaaatttgtaatacatacatataatactaatttaattgtacttgatccctgtaagctatattgggttacagatgaataaactttaaattaaactaaacatttaatatttaattatatttaaagtttatgttttaaaaaatatttttattgaacaggtttttagattacactgttgttttattcaacatcaatttggcgttgttttattatctatcatcaattaacatttcattttttattactcctatcttgttttaatcaattgttttaatcatttaatttcattttattatattttctttccgtcttccagaatttttatttcaaaatctctggaatctccaatcaatgcatgtacttgtttttttcatttcaaattaactaaactacacatcttttccaattataattatataaatttaatcaagaattataatcacaaccaataaattcctgaagtccagaacaatgcattactatgatttttttgtggattccacagattcctcagtttatttcagggttaattaaataaatcctcaataaaaagaatttttatacttttaaactcaatcaagcatttccctgtggaatctagtttaaaatttcgtttgaatcagtattgacttaaaatttctcctataaattttaacgctttaactttttatataattatattacacaaatatttatgtatttattaaatgcttattatgcatataaatgatgattaaagcctctatcatctttcaacaacctatagatacacattgatattgttagtgatggtttccaataaatttttatatatttcttatattttcatcttattgatgataccattttcaaattttagtcgtttcggattaaaattttcaaagtgtgctgatcccaactcatctggtaccaatcttgttggcgtgaaaatatccgacattaaatttagtagcagagatagggataacaatgggtttgttaaagggttcgtaaaggttcgcatatacggtaatcttcacaaatttgcgtttcattacatttatatcggcattggtaaccccaaagttaaacagatgctgatcatcgataccggatcacaacagataaacgtagcgtgtggaaggagccccggctgtggaaaacatcttttagataactacaattaccaaaattcattaacttacaagcctgttgactgcaatagtgagtcatgcaaaataatggagggtaggtgtgatttacaaaaatcttgcatttttaaggaaacatattctgaaggtagcagtgttaatggtatgtacgtgggcgacttggtcagtttcgacattaatgaagattccactgacttatcttcattttttgactacattggttgtgtcaccaccgagagcaagcttattaagagccagattacaaacggtattttgggtctttccaggagtgataaaagcactttgattgataacgagtattacgaatctcaaagttttattgagaaatacctcactgaccacttcagtccaagacacaaaatattttctttatgcttcgctgaggatggtgggatgttaacattgggtggttatgacaaggaattagatctacttgttaagaaacaatccaacttggtatggacacctatgatgaaatctgagttttacatcttaagagttttcaaatttagtgttgatgatgatatttatgaggttaaacacaagaactttgttctcgacaccggaaccactatgagtacctttgaaaaggacctgtttgacaaaatagagaagccaattaaacaagtttgttatgataacaaaaagttttcaaaagccaggaaaaccaatgttgtgtgcaaagttgatgagaaaactgggaaaatttgcttcagtgatctttccaaactgcctataatcaccatcaattttgaaaagtaagttgttttatttttaattttctttagtggttctaattttgactggaagcctgaatcttacatgattgatcgatccatgaagtaagccaccaatttattttaatattaatttaggcgcactttaaatgactatgcttggtggtgtttaggcattgaggagagcaaaactcacgagaacatccttggtgctacttttttcaaaaacaaccatattgtcttcaacttagacactgaattaataggtactcgattattttaataaaaaattttaggaatttcacatggcaactgccccgataacagggacatggacaactcgaaaaagaattaatcttttgggagtcatagagaatacatttaatttttaatgttttcgtaatttatataattatgtgaaatttaataaatataattgtatttatatttctatgacattagtttatcacacaggttaaatggtagattgttcacctttatggtaagggataatctagtatctggaccttgcgtggctcatacttctcttcttcaatcccaaaaagactgtgtgttgtgaccctcctgatccacctgtaatcttacagtgcatgtagtgaaatggcggcacaggttcaggtgaatactgaaagaaatagtcttttccgttccccagcgtgtagttttgggctgatccccatgcgtacaaagttccatcataggttgttgcgaaaatactatctgagccatgaaatactgtcttgaccgggtctttgaaatccaccaggagtggcgttgtcgactttcctgattttaggaccctcttataagcactttcataatccaatgataaaagtttttcagtcacatccagattatccatttcgtgccctacttcttctaacctccttctcttacttgacgagtattccccgtaatccggtgttggcattacaaaaaactttctttcctcttccttcaccctcaagtgtgagtgaggattgtaattagggttatggtaactttcagatatacccaagtaatgtacttttccccatgcaaataagtagttgtttaccaaggcgattgtaaagaattggcctcccgataaatgagttaactcaactcctctgaaaaacgatagttcttttggctttgttaccacattttcttcacttcccactccaacttcaccctgtgcatttcttcctgctccgtaaactctcagtgacttggtttgaaaaaatgttgtacagtttccagtgaaaatttgtgcaagtacttcttcattggttctacctctcttcctagtccttgttctaagcgttgtggttccattatcatcctcctggtcatcactacttttagctaaagaaagtacgtctgttattgttctatgttgtggccaggttagtaacaacttcctatttgatggtaagctaaggtctacatcgttatccgtaggattttggatctgagacttatcccagattaggagctgattgaactcattacttccaaatgtgtacatactatgacccccattacacaataaaacacagtgattttctccgctggctatatctgttacaactgtcgaaccttcaacatcgcacggcacctttacaggtaatgatacataatccagggctgtaagagtttcaaagtttgagtaatttgcaattccaataggaccatccgtatccttaaacccacccgtaaaaaagacatttccagtgaaggagaggaacatggtgtgattgtctccgcacgttaccttcttaattgtgtactttaaatccactactgctggctcggaatctatcggtccgaatgacggatctgagttacttaatctacccaaagctcccatatcattacatccgaacgtataaactaatcctgtactggttagcagtgctgtgtgtagcgctccacaagctacatcaactactctcatttttggtaattctacaattggagttggaagtgagctttcaaacattgattccacttcgcctgtctccggcttcatgaatttatcacaacatgagtgtgggagctggtccatttcagacgatccgacgacaaaaactacggtgtgtttgaggtcattttgagagtaatttttcctcagtcttctgggatcgtcggtatatttgacaaccttctgttgttgaaaaacttgggtttcgcggttatggtgaacggtcgacgtccctgaacattttaaaaattacaaaaggactcattaaatagtatataattttataaatatggatttacctactgcaccttttattgaaccacagcaagagcagttattatcgttcctatcgttaggaacaagacatgtgtcacaaacccatttatctgacattttttttgtaaatacttaaactacgcagacttgagacttaacttaggtttttgataaaaagaatcattataatttacaaattaaatcgaaattaatattaattttccagtgttttattactattgttctagcactatatttaaaactctaatgtgtaacaacttccactatagaatgggccgccttccgcggtctatgctagctaataccctaattaccacctaattacccagttttaaacataaatttatattttacaaacattttccaactatatatacccctattggccaattagttttagtttatagcatttatgacatgttattttatttagttttatttatttcagctactttttttactattacctacttatacatgtatatttttacttatacaacatgagtaatttacataatcaaaaatattcttgaactttatttaaggttcgtactctaaaaaattcttcaaaattcttccctcatttaaattattcaacaaaacttttgtctatcatgttgatttcctcctccattctatggttccccccttcattttcttatttattgtcgtccgtcctagggtttccttttgaagaatccgaaactaaacttagattcagtttttggtggttctggcttacctattttggggtcagggatatctttacctccagcacctccaacttttccggcatcttctgtccctttaccatcgccatgaccagtccctggagttactgtagcatctttgtttactgtcaggttggtattaccttcagggctggcaacagcacttggttctttttttgggtcaccatcctctgttttcttaatttctgcctctatcaactcctgttctttttgttgttgttctttcaacttcttttcctcatcttcagcttgtttctttgcgtccaacctagaaatcatttggtttttaatcgactccaaggttttcaactcttctgctactgcaccatcttctccagggaagtttttcttgtaaacttcgtctatgaattcaaacgcctgtggcaaagttgttattactggaacatcaattttcacctccttttcatccttatcgctatcaaagacgccacttattgccaggcacactattactcccactattaagactcccaagaccagggtcgttcccactatccaggctttctttgatgattttttagttctgattgaatccattttgtacgttattttatgcgtgacttgatttatatttactctgcgtaatttagtatctagaaaataaaaccgtttctattttaatgttcaagttgtataatttgataatatttaataaaaacaatttatttttaatttaaacaatatattaactatgattatcgttttcttgattaaaaaatttggtggaatttccccttagatcttggaaaattctcgtcgaattttcgctgcccctatcaggagctgcgattatccctaaagggtcgattcctatttacccatcgtttcctgatactcctaacggctttgtgattaaataaatatcaatttatcatattatgagacgttatgatccagatctactaaatatcaaaaaatgatccgggctctaactagctcatttacacaaattaaaataattaaaaattacaatacaaataataaaaatattattaatataaagcgaatttatattaaattataagggtagatctgatccacgtgatctccctcttacatacgaccacattgaagaataaactgttttaagcgctccggcaccacctatatatttattatgtatttaactttaatgtgtattacctggtatatatgatatcattacagaagagagtgcgaaaaattgtaccaatgagaagatgaatgcgaaaacatacagaggatagaaagtggtaaaaactaaagtacacaggagagaaacaagatacgagacggtgaacactagtcttttagggttcagcatgtggtcaattagggagccagctcctcttaaaaacgacattgatgataaaaatgttagagacgccagtgtgaaaaggagtccaaacttataaggtgcgaaaattataaaaggcagtgacatgaaagacataataaaaaaaatgacagaacatgcaaacaaggccaggaaagccttatagttcgtatacgttttccacgatggctccgcttgccaaccatttgtaagcccgaaaatccctttaccgaaattcattgccgaacttaacctggatttaaacgaactagttgattcagtttttccaaaatctatccccttgagtagaaaattctcatcctaaacatcatttaaaattaaatatcaatgttatttatggcttagatagataagatacggttttatttgaaaatatgggcaaatttgaattatctcccatcattgtgaaataacagactcaattatataaaaaccaaaacaactatattcttaaatgtgaatttaaaattattcaaaataaacaaaatttgccataacagtttaaaatatcaacattataaattacgattaaagtgaaaaatactcctcaatgtaaaatcaatcgaaaatcattaaaaatgttagaaggtcgctgagtttatatattaaaattttttattaatcaaatgttataaaaactaagggtaaaattcttatactagataaatactgtcgcaacaactatacgttaattattattattttatatatgggggtttgactcagatgatttgaattatacagagttattcttttgctaataatgtttcagtattagattattggttttaaaatatgacattcatgtccttacatttctaattttacttatgtattggccccttttggtccaataccttgtttagaatcttaattaaaattacaattaactttagaattttaactacattcacttgttgactctgaatttttaattatattttgtgatgttttatgcttcaacaattttcactcttgtagcatgtttacccctttacacatttatgataataaacaaggttaaaatacacttttattctaccagaatccatacatttacatttatttattagttttatcgtgtaggaatcatttttttaaccttattatacattgcaacaaggtgcatcctcaatcctactttgtctaacaagtagaggaacagaaaatcctttaatatacatttatacaaatacttatttatatatgtaaaataaataaaatctctaaatacaatgtacaagttggagtaccaagctgttatgctcgcgcataggattgtatcctatgctcatctctagataaactgtagtaaataatgagtttctaatgaaagttttattatttttaaatatcgtatttttatataaatcagcccttgggattaatgtaacaacgggcgtggaggatgccatcttaagtccgtcttctgcaactgaggtaatattctacctactatttcaccaaaaataggtttaaatacacctatttctatctgtttcttaacaataagttttaattttgaaccatttatttatagttattctggtaatattgtgtttcatatgtgaagtttaaatgtgttaacaccagattcaaacacatttttaatattatttataggaaactttactggacgatgctcttttccaggggttggttgaaggttacacgttcactttggactgtgttaccatgtccaaacatgaacacgacgatcctgaaaagattgaaaaggagctaaacaaggagcatgaccggaatctaaaggaagcaagtttggatggagaatatatgaccaaacatcgtacaatggagtcacaaaaggttgacaaaaaggaggcggatttatttactgaattgaatatattaatgcactttcttaactcaaggggccaagagtggtccttaaaagagcctaaggagttggattttgaggagagtaatgaaaaacacatggtctttgtaagttcagcaaacgatcacgctgaaataaagatacctcaaaacatgttctattcagtcggcaacatgaaaaaaagtaagattaacaactaataattatttttagcaattcctgtccataaagataataaaaaaccaattctcctgacatgccttgagtcatttatcgtttctagatttggatttcaatccatggatagattaactaaaagtagtgagccagttgccaataaactggaatatctgaaaaggtgggttacaattgctaaacagcattacgtactttatcttccctacgtctgcatcacagctccaaggtgtcatgaccttcttaaaggagaggacgacgaattaaaatcagactattccaataataaccactataaacatctttttgttgtttgcaataaggtattagtttccatgataatgttttttagatgcttgaaaagagaaaagatgacggcgttctacaaacctatgtgatgttggattcagatttgcattctgagttaatgcggaaaaccattgacgataaacatttgttcccactaatgcttcaagatagagaaaacaccttgaagaatattcatgaacatcatcaacacgaaatgacttgggaccagttccaaagtgctgggaatttgttactggctgaacttgaacaggaaatattaaaaaacgatttgtttttaaagcctgaaagttggggtataggtttagattctgaacaatcaaaaaaagctgaaatggaactaattaaactatttgttaaatcacaaaagaaactgaattttaaagttattcaaacggtgaggtcggtgtcccatgaagcaatacacaaatccaagaaaggagacgaagagcttaagaaaacaatgataaaattctctgaaaaggaggagcaggtaaaaatttagggttataaatgttttaggcagctaaaaaagaagcctctaccaacagttcactcaagaaatggatggaggaagctgttagttcattaatttatcatttttaaatttttaggagcataatttggacgaggatgctaaaaaattttcaaactcacaaataacagatatcgctaataaactcaaaaatttcgaacacgacacatggatggaatgtgcgtcgtctagaatttttagtaaacttgcaaagatttgtgaagacaacgaagattactgcaaaactgttgtcgacaagttacaggatgaacttaacaatgcagacccagatagcagttcaacgatcgccatggagaacctaagctacggacttaccgctgcacttttaaagagtggtaaaattgatatggaaaaagttaagaaacaaatcctaaaagtatccaaggaagaaataaaagatatgagtgaacctgttaaatcaactgaatcagaaacagaaagctcggaaagtttagaaacagaggacgaaggaaataaaaaagaaagtgaataaaacgaaaaacaagagtaattaacaatagatcaattttaaaatgtatagtgtaaaaaatgaaaaatgagtaactattcccacggaatcatcatcaccttagatgtcaaaatgtattataattttcttgtttaatttaactaatatttttagttattattttattaattttattgtttttaatatgtagtttcgtttcaatattttttaaacatatcactgttaaaatgttcagtttatgtatcatactttagaatttaatgttttagaatgtctaaggatactgatgcatcttcgtctaaaaaagacgaaaatgacgactccttaacctcgtatttaaatgttaaatctccacttattggaaatttagaatttgatgtttctgttcttccacctccagtcgaccctagattcatcgactacgaaataaaaaatgatgttataaagtatgaaatgactggacttgagttatctgatcgcctttcttcattttcagatttcacctcggggttatctgaccctttattgtacggtaccagtttcaccggatgtggaattgagaataatgacctaatgacacatctggaatctgttttcttgagtaaacataaaactaaaatcgattctaaagacacatatgtagatttggttagaaatgatcttttggagactatgaaattttttgataatttgaagatgtcctcagtacttgctaaagcccaggaatctctaccaggttacttaaataatctagtttcctcaactcaggaagaagggttttctaaaaaacagctcaagttaatgcacagtgaagaaatttctggaattccaagagaccagaagttaaccatttatgaatcatggagcaacatgaactacgaagacagagtcgatgcttacatctcagcttttcagaatacttttgtatctacagatcaactagtccatccaaacaacaaatatgcaaaaatcctcaaggttagtcaaatataattataaacttcttaggtgtacaaggtggttccaaatttgaaactatgggacaataaatacattcaagttggaatagacggtgtaacggtatcatcagattcatcttctaagctacactctgatggtgttttaagaccatcaaaggaaactcagacacacagatatttcgaatactataaaaaacatttcgagaattcacctgaagattcctttcccagtactaacttcgctagtgattcaaatgatgcggatgctatggatttagatgggactgctgaggtaaaatcggaaaatgacgatgtcgacgacttatttgatgaagaaatggacgaggatgcaactaatgaaatgccggaaaataatactgatcaactgcctgaccaacagactgatcagtttaaaggtgatatgtacaagtttattcgtcaatataccacacaggtaataactaattaattatcaacgttttagaaatattccaaaacttctggagcggaaaattactatttactcacactccccaactcgcttatgaaaaaagctgacattcacaataagctcaattccgaaaatatggaagataactctgatttagtggaacttgttccaatcagaggcccaaaactagttttcagtaaagctggagtcacaaagaggccagatattcacatcttatacacagaatcttgaagtacattattttaaatgaatattttaaaaataattatacctacctttttgattagttgtattttctataattgagagaatcacataaaaaaaattaaaagaaaaaaggtaaaatgttaagaaaagtttgtcgaatgaaaagatttacaataatttgtaaaatgtgttaatatataacaaataatatcatagaaattcaccagaaatatattacctattctgaacgtatataccccactctaccagtaaaagattccaaagataacttggaatatattttatttatataaatataaatagtcattagtggattattatatataaagaatcttgtgggtctaaatatagaaatattcactacaaattttttatattttatcgtccttcatcctctttaatatattttttatttttattcctcaaaatataaaagatttatttcttaaacttccagatataaaatatacgaatggcatcgagttcatcagaaggtaccagattttttcggtagttatacattagtgtattggatcatagtatattttattttagtctctaagtctgacaagaccagaaaagcaaagcttgcctccagaagtgttaagaagtcaacctcagttaagaaggtcaagaccagaagaaacactcacttcttcaggtatgtttcaaatttaaattaatttatataatttaatttagaggacggactctctcacttaagagaacacccaagtatgaaaagaaggtcaaaacagcatatacaaagaagttggacaagttctcaatagtgaggtaccccttgacaactgagtcagcaatgaagatgatcgaggagcttaacactcttgttttcgttgtagacccaagagcgaacaaagctaaggtcgcaaaagcagtttcgcaattatatgatataactccagtccatgttaacactctcatcaggtattaaaccccaaaaaatatatttttataaacaattgtaggcctgatggtcagaaaaaggcattcgtgagactatcaccagaccaggacgcgcttgatgttgctaacaaaattggaataatttaatctaatttaccaagtaaatatacactatagtacatttaaagctcaagttttaatactctgtacttattattcgggtcactttcgtcggccacgaatctgcatttctcagaataaaaggagacggcacggtcgtttgcagttaatacagtacacatgagctttttacagcaaacagaccttgcaactaattctaaaacgaaaataaaaaatctgcccaaaccacgagacctataggaatcctaaacagatataagcttaagatagaataccttaatttggagttcataaatgtacaaaacaggagccggatcctggttctcacgcattactacaaacctataactcgtaaacccaatgaggtagtcatctaaaaatcgttaaattaaaagaagatactgctataaagtgcgattatgtgagttctgtagtatttcatctcggaagattttttcttgtcgttccatccgccgttaaatttactaatattgtatagagatttcatgtttgatcgtgttaaggagaaaaactcgttaaataaatctggaggaactgagttacctttaaacaactttaagtttaaagggccctgaagaccagataaggcattaatgaatccatcaataatggatttggaggcaagatttgaggggattttacccgaattaatagaattatttaaatcatctagaatttcagatgttagaccaaaaacattatcgtaaggcttccaattttttattccttttatcccagaatatttcattgtttatgaagaagggatcagtaaggaataagactgtccatggatgtattatgtaccatataaaaattatggtagaatatacatagccaaagaaatattggaaatatgtgtagttgtattatggaaaacgaccagctgttttgttgggtaaataattaaccaaatcataatatatataatttattatatgtttaatatgaattaaataagcttgtaaataattataaattaatcctagattattttacactgtaaaatatggcagtaaattccagttctgcttccaacgcactaattcaacagcttttaaaggcggaagaggaagcagagtccattgttcgaagggctaaagaaagtaataataattattattatataaataattgaaatattaattttactgttcagatcgggtaaaactattaaacgaagctatggcagctgcacaaaaagatttagacgagttcagacaatctgaagaaaaagaactcatggaacaatataacaacgtatatatttaattagattgttctaaattatatttaaatcatacaacgatgtgattccaagttcatctttacagaataatttttaggaatctgttctagaagaccctcgatcagtcatgttagaactcaaatccaaaaccttcgccgacgaatgtaatataaaattaaaggaacttaaaccaaaacttgttgataatcttgtaaaagcaacactagatatcaaaatattataatatgttaattttacacgtacctttatatttatactaaatttaatatttatttagttaataggtaaattttctaattgattgttgtaagcgtgttgttatatgtgtaatttgtaggtatgtgttgatatgttttacatacgaaaattaataaatatgttttatataaattattttaacaaatgtttaaatccattttataatgtttttatgatatggatgaaatctatccaaacctctcaaaattgtttccggaaaacttagaaaaaatatgtaaagatttaaagtggtatttggattcctcaaatggaccgaaaaatctatttgatttgcatcccaaatttaataacaattttaagaatttattctacagtataaacgtcgaaactcttaaaaattccgattcttatccataccttatagattcttcagatgacttaaatttaaatggaggttcagaatattcagaagattctaaaagcactagagaggccaagaataacaatgataaagaattgttgaagaaggtccaggaacatggaaagtattttgaagatgttaatcatatgtgtaaagagaaacgatctcaaatagagaagaatataataaatacactattatcgcatgaaaatgaactatcagagttcgcaatagacctgaattactgtgataacactctaaaaatgattgaagattcactgaataaacagttcgagtcactgcaagtatcctcaggaaatatcaaaaaactccatgacgagtccaaagatttgtcacacgcactagaaaacagaaggaaaatggtagagaaactagaagctttcgtaaaagacgttataataacacccacaatgattaaggcgctctgcaacgatccaataaatgagtcatatgtagtacaggtagaagagttcggaagaaagtcagagaatatcactaaattgtacaaggacaaggaatacccagctgtggtaagcaatacagttaatttgttttttgtaggagttctcaaagattcaggtcaagaagctggaactggttttaataaggaggatttttgactttctgtcactagagataagcaacctcgcaacaccaaaagttaatattcagatggtacaatcaacgagatttatggcattccgaccactttataaatatttgtgtaatttcccaaaccacactcaggatttacagtaagttaattttcccataacaattatgtaggaaactgtacacttatacgatgaagaggacttatggtcatctgtttgaaaattacctgaactcgttggaggcatgttttgaaaaggaaaggtgtagagagacgtcctgtatgctgagaattagaagtttggcagtagttcagaaacaaaataaaacaataagttattatgacatgaattcaagagattcaatattaaaagattttaattcacaaccagtactaccaacaggattacaaccaaactcacttaagaaggagttgattgtaaagtcatattttaaactattagttgacacctgcacaactgaaatgtcatttatatcttcattcttctttttaaatgaccccagccctaacgaaaaaccagaagcaaataataacacaagtaaagaaaagttagataagagcatgtttaaagaaatatttgtggaagtgtttgaaataatgtcatgtaacctaaaggtttatctgagaactagttttgatttggtggccttaacattaattttgtcaattttgaggttcaatagaaggttcctattacatagagaaataacattcttcgagtctgaaatgtatgagtttgaatcactgttgtatgaaagacttaactttctcatgaatgaaataataagtctggtatcaaagacgacaaaatcacctaatatatcaactattctcctatggaacccagcaccgtttgtggttaactcatcgcatataatctatgtcatttcaagacttaacgattacacaagaaagctgaacccacatgtcatccagctgcttcagattctaagtgattttatagaaaaatcatcagaaaaattagacgcaaacaagaattcgatctttatgatcaataatttggtaccattggtgtcagtacttaaaaccataactgataaaactatgttttcaaatgaaaattttgatttcggtgaagtttccaagaggtgagatttgtttaaatcaagtattttaggttggacgagaatctgcagaacagtttaacattttattctaattttcttttaacagagtttatttctgacttgattaacattatggaggaagaggagccaacaattgaaggagttacacctaaaaaaacattgacattagccacaatggcattggaatataggaatttggtacccttttagtattttaactgtttacactattatttaacataatttataatttccccaactatttaacaatttataattattttagtgtatggagtttattcaaagttataatgagagagtctcacttatcaagaatataaattcccagtcatttatacatccacagactctagagctggttaatatacacgtaagattttcagtttcacattattttttaggtttttaatatgttttatgaaatttactctaaattctacaatattacgaaagacatttttaaagatacaccgacggagtggttttcaaaaatgccagacccgtccgagtttaggccataatttcattaatatatttacacatgtattcgtaaaactgtgaagaaattctataattaaggttaaatatgttacaagtttaattctgagacatctgttggttgaaagcctggtggacttggtcagtagcagcagcaaggtcaatattgccgttttgatcgaggacagcaggaccatagtaggccatagcatttctggatttataatattcgtttctgagagcagattgagttaactttacgtcataacgatgtgaaacaggttcaaacaaaagtgcccacatagagcttaggaacaaagaaagaccaaaagcaacggtgtaaagtctttccagaactacaaaagcaggagtatttaagaagtttaaagcagccatttgtaaaaccccagcagtcaaaaaggttaatccacaaagccaaccccaactttcattagtaccctcagaatggtaagtttcgaggaagaaacagccaccagcatataaaactagagtaaaagagtcgaaaagtctagaactgaagtaaattagccaagaagaaccatctccaatttgttcgtcgagccattgggaatcgaaatgataactagcacccaaaaaagtaatcatagataaacaccaagatacagcacctaaagtacatgaagatagtaaaacataccaaatgaagtggcttgtaaaagaaatttagtccctgccctgtaacctctgcattgcttaatactagcatcgtcttctcccatttgaatgaacgacataatcattaaagttccagctaaaaacaaagcgtggcataggagagtcaaagaaaagggagcagaaccaaaattcttaggatctgctttcaaaaatgataatagcgccagtggatccttaccaccagttaacacaccaagaaatagaagtaggaatgcagcaaattgcataaggaaaccaaatctgagattataattcatcaagaagtcccaaaagggctcaaattgtggacctcggctttctggagcctcgccaggtctaacaacgtaagtaaaatacattttattggagaaacacctgaaaggtaatgttatattggtgtaattttaaaagaagaatgaaaattaattattgaaaaaatttaatcgatagtttaaatagataaattaaaacatttacaaacacatttcattaaaattaaaagaaatcttctaattaatacaaaaacaatcaataaaaataaaatttatagctgaaaataaaatatttaaggtaaacgtaccttagtgtgtaagggtgtgtaaataaaatacgctaatttcttaacataaaaccccaaaagttaatctaaatcatataaaatttaaactatatatattgagatataatagatattataaatggtagtataatggacaaaatttgtaaatatataaggtgcatttgtgaacttacgaattcctaaaaattcctctcaaaatgtcggaaataaacaattttataataataaaaggctattttaacaaaaatgtgagaatttgaacaggatatgaagacttaaaattgtgatcaactactaccttagtacgcttaaggtggggaatgtgttgattcaagtttctgtagaatatttatagataaatatttaaaatgtagtcctccattataaatatgtttttatttacaagtacaaatatatttatccttctttaagaattttatacaaagaatgatattaaatctttttacaactcttgattatccgaattctttacctttaggaatacttacccttatgttaacatgtcgtatgtagaaaaattcagtgaaattctagtggattcaagtaaaaaagttgaatctctggtatttggttcatgctgccttttgaccctgattgtttttatatatgtgattataaagatattctcttcaccaaataaaccgccaacttgcgaatctataataatcgcactatcatgctttcagttatctctggggacgtggttctattttgtagacgacgaatcttacataaatattctaaacaaaggaatcaaggtactacaatgccaagtaatttcttggacttgtatgtacatcttgatgaagtcaaaggagcggtattacatgtaagttgactgtaaattcaaagattttcagggcgtttaaggtgttttcaggatgtttctccggagtattgttgtttttacttttctatggattaacgagtggagaggtcccgttttacctaaaaattaacatatacgtctcgtttctatggctcacaatgtcttctgtcatattagcaatcgcaataatcataaggaggagactaaagtttgcaatgctattcaagtttgacgtggaagagatcatcgatgttgaaattcagaagatggataaatccaatgaactagtagacacattcacaaattcgaagttttcccagtttttcctgttatcagcaatggaattttccacttcaatggtgagttacaactagatttaaacctgtatttagataacatttatatgggatctaatcatatttttgaatgttaagaagaatgaaaagatgaatttctatgagctggacatgccaatatttaaggaattcttacacatcataacaaactcgcttcttatattgatacctaactggactatattcttcgttttctactggtattaccaattaacacacttttaaaatgttaaatcataatcatttataggttacagaggagaaattattcgaaattatcgaaagactgggacgtcaatatgtcttctgtagagtaagtcgatccaatttacaccttctaaataatgtatagatatactaaagaaccgaatcaattttactagaaactctaaatgttagtatggaacgtttcaaaagttcaatgaataaatttttattgtaatattagtgtataatattttaaatttgatgaattatgtgttaagtatggtgactcataccccatccgcaacctttatatttattcaatgttcacttataattttttctctgaaaataaataatagagcatttttaattttttaaattaattgaaggcttattaagttgtaagctgtatcgtatctgaatagaatcaggccttagggttaaacctaatttctctgatgttataattattctctaaatttattgaaattcctgactattccaaataatggcagattctaacatttcagacacaaataattgttacctgaatccaggattaagccaaccacaacagtcctataacactaacgcatcatacgcatactctaacgttggagatgtttcagaaaacccaacatatcattataaccaagacaaatctaatgattttgtaggtggatatcaacagtcaaacggttattccaccttaacagaacaacaaggccagaatttaaataattacgaatccacccagtttgtaggctaccagtaccaacctaataatgtatcttatgacaattcatcacagtaccagaattattctaaccaaccagagtattatccagttcctcagggacaacataaaactgatgaaaactattactctgtccaagatgaagctaatttagcaaaacaacaaaatgacgcttatcaggttaattcacacaatcattattcacaatcagatcgaaaccacgatggttcattgactactgatactagtagatcatcaggtgctaatgaagaaagattggataaatcagatagagactacagacgtgatagagaacgaaaacgctccagaaatagatcagtgaatagtagagagagctatcgtaggcatagaaggagaagtcgtagctatgatagaagaggccacagacgaagccatagccacagaaggcgacgaagcagaagttacagaagaagtaggagcagaagccatagaggcagcaggcgtcatcacagccatcgccattctagacatcgttcaagaagtcgctcaaaatcatcccacagagaacgtgaagttgagtaccaaaagagtgacaggactgataacgatagggaacctagagatataggcttggatataatggagaaggcaaaaatccttagatcaaatgaaatggaaagaaggagaatgaaggacatagaggaagcacaaagagatgatttaacagttttggtctcaaacatgcacctctcagtggatgaaagagacatatacgagctgtttagtgaacacgcaggaaaagtcagagatatccagtgtgtaagagatctcagaagtggccgttccaaaggaatagcatatgtagagttttacactcaagaatctgttatcaaggcactttcaatgactggaatgtcaatgaaaggtcaaggtattagagtacatagctcccaagctgaaaagaacagagcagctaaggcacaaaaacaacttcaggataatgccttgaaggaaagtgacaatccaactacaatcgttgtatcaaacctattgggagttttgagttatctgaatgaaattgaactaaaccagttgttttctccatttggaaacatcatagacgtagccctggcaagaacagatgatgggaactctaaaggatatgcatacatacgatttaaacggtggaacgaggctaaggaagcgttgaatgtgatgaatggcttcgatatcaatggacaacaaattaaagttgcctacgctaacaccagaaaggattcgaagagtagattacactctttaggtgacgtggatatggaaagacttgatgacgatgatgcaggcttaatatcaggatcaaacattaaaatagcattaatgaagaagttacaacaacgccagccggtagttaattatctaactaattttatatttagttaatcaaattatttattaaatcattcaatttattgatttgactaatgattttttagcttaatagttctaacctggtcttgagcaacatgtacacatctgcagattatgaagataatcgtgagttctttgacgagattgaagaagacgttaaagaagaatgtggtaaatacggaaccgtaatacaggttttcgtgaataaaagaaatccagacggaaaagtttatgtaaaatttaaaaataacgatgacgcacaagcagctaacaagagcttacaaggaagatatttcgcaggaaacaccatacaggtctcgtacatctcagacgatcagtaccaagatgttgtcaataagtcgtagttttagaataaaaacagaaaccaaataattattagggtctatttgaatgaaaaacggaattatttttggattcattgataaatctttatacacataccactataaggcctgccttcttttaaactagtttataattttttcgcaatttttatgttacatttttatattacattttgtgtgtgctttgaacacatagaattacatgttaaatgtcttgaacgttgcagagaagccttcagtggctaagaacatcactgagattctatcatacggaaatgccacaagggtacgcactttgaattaataaatgtttaggaatttacacattccaaaactaaccctgtgtactcattccctcactggtttgaagggaatatgtgcaaaatgtttttcacctccgtcaaagggtactaactgtatatttcaatattgattttagacacttaacgaacctagacttccatcaaaattatcgcaactggcaacgcacatcaatcctggatttattcactggtaacttattttagacttacacattctgtccagcacccatttatcctttcatcacgagcgactgtaaagatatcgaaaaaaacatactaaaatacgcaaaaatgtatgatattaactaaaaaactggattccgtgaataggtctgacgctattatactctggctagactgtgatagggaaggcgaggcaatagcgttcgaggtaccatagaaaaaataaatttctaaattttaggtcttggaagtctgttataaagttaagaagaaccttatagttaggagagcgatattctcatcagttacaagtcagtttacctttcataattggaattcagagccagacattgaacatgcctgtgtaaatttgaaagaacctaacaaaaatctggcaaatgttagctttaattatcaataatttacgtttaggcggttgagacaaggcaggaaatagacctgagaataggtaagaagacttcttaacttatataatctttaggttctgcaattactcgatatttaactttaaaatataaaactcaaataaacactaaagctgccattctcaggttagttttaatattttaaagtgattttagctacggcacatgccagctacctaccctgggatttgtggttgaacgtttcattttaatagagaatttcataagtgagcccttttggacaattaatgtggaagttactcagtaagttattaagttttaaaacttttagtgacaatatccctgttacatttctctggcaccgcaagaggatattcgacgagttagttttaaattattcacatcttttagattagctgttctaacactttatgaattatgtgttcaaaaccctagagggactataagaaaggtaccttttgtctttgtttttgttttttctcctaaaatattcctcaggtttttaaaaaggaagttagaagacatcctcccttaccattaggttattttacttactcaattattgttattacctataatctatgaacctaacttcccacctaatattcctgtaaatttaataattttccacagataccatcgagatgaacaaggatgtcagtagatttttaagaatttcctcacaccggtgtatgcagttggcagaaagtctctataacaagggctacataagctatcctaggacagagactaatgctttccccagctctatcaacttaaaatcaataattcacaacttatcatcagttccagaattctcacagtacacccataaccttttaaacggtataacatatataattaaaacttcgtaaatcacctaaattaaatagtttgactaattattctttagagggcgggttcaaagaaccaactaagggaaagaataacgatgaagctcatcccccaattcatcctgtcaacagtctcactagagatagggctgaatcagagcaacactggctactttacgaatacataactagacggtttctcgcctgctgtagcaaagacgccattggccaccagtccaatataattctggaaatttcaggttcttttatataaaaaacacatttagttatgtaaaattatatcaattttcatcctttaattaacatattaggtgaactatttaatttaaaaggtctagtcattaaggaaagaaactggctgaacatttataaatacagttcctggttcgtctatctcaatcaaacttatattaataatccagggaaggaaaaatcgttccagagtttcaggagaaccaggaagtaatccccactgcaattattttaaaggttttactccaattacttctgagatataactaatcataattttaggatggagccactcgtccacctgatttactttcagagtctaatttaattgatctaatgaacaaggtttcttattcttaattatgaatttcaatgttgaattgtctaatttctattatagaatggaattggaacggatgcgactatgcatgagcatatacagaaaattcaggtaacccacaaatacgttgcttactatttttaaactattttaccactttattcctattttattagatttttacatactatacactctacactatcttcctcttcaaactttgttaggaccgtcactattgtgttaaagacgataaattgagatttgtccctactaatttaggaaaggccatatactatgtaaggactcctctacatccaatattgaattatccatcattttgtcatttgtaatcatttttagggtttcaaggaatataactaccacaatattgacttgactaagccaagtctgagggccaatatggaaaaggacatgagtgacatatctgttggaattaagagaaaagagcaggttgttttgaactacgtgaaccttctaagatcaatttatcagctcatcagcaccaactctaataaattcgacgcctacataacttgtttatctcgtctagttcctgacgacgctcctctcccaaacaattgttaattttattttaaaaaattatttttatttattaatttatacgtatataatcctctaaacgaacaaacataggggtattaaatttaaatcgttaaagttagagcatgtatactgtgtaagttataccacacttttctaccatcaaacagtttactacttgcacccgtcgcgtcttgagtatctggggaatcaagctcatcatccgtgtctggatttgcccttttgagtaagttatggtaatttttaatgttcaccacttcatgcggaggttcattacaactgttttgagtattcgaaacacttgagtctgaaatttgagaatactttctcttaaatcgtctatctttctttagtgagcccaacagtgtgtaacacttatttaacattgctgcgtaaacctggagtatcaattccgggttaatgctcgagtttactgatcccatcaatatctcgttaaccatggtattagctgtaaaacagtgagtaatctttatatacaataatgaacaatcatgcattattaacaataaattatcttattaccttcatatgacgtagccagcaattgtcctgtttcttctaatgtagatagcacatcttcaaatgaacagtcgtagataatttcctaaaattggttaaataaggtaaattagaagcgaaactaacaagtaataggtgtagtatctcgtgcaataatatctgtttgaaattctttaatttttgcttttgtctattttgccaaaaagccttgagtttattttgtttctttataacgacggctagaatcaggggcacaagagggtaaaacacaactctcttggcaacaagaggtaatttcgatatgccgcatagggcaccatataaaacagggagggtacaattttcatttgtgagttcgtttttatataaattcattaaataatcatctatgctttctagtccgttattatttttctttagactaaaacttatattacttatacactgaacaatcattagtaatttggaattatttatatatagatgtattagattaatttatatatatagatgtattagattaatttatatatatagatgtattagattaatttatatatatagatgtattagattaatttatatatatagatgtattagattagtttatacagatgttacatacatgtgtactatatatatatctcaagacagagttaacaaaatattgtttacctgtgaggataatttgcgtaacaatagcgatctatatatttgtataggatttgtatccatttcgcatgacaacaacacttgtaaaagtggaattaacagttgatgtacctaattccgaagttagttaaagagaaaccaaatcaaatgaagtataaatgtagtttaacatacatagtggtgtatttgtatattctggttgcttgttagggcctcaacatattgcaggagaatatggatgttaaatgagggctggtttgaattgattcggttaatctcatttataaacaggtgacacaattccgggagaagctggtccagtccaagtgaatttctcaaaatttcaaccactgaacattaatttagtgtttaacatgttatttgttatttttttatttaaaataggtaaaatttaccttttttgtattggatttgtatgtctggttcctgggaaaatgatgctctctttagcatattctttatttcctttaggaagaatcgatgttcctaaattttcattaagttttaatacattttattggactttattaaatttttgttaaatataaccgagtaatttaatatttttacctttgttaaaatataatctattttcggtataacgaatttttgtgttctggctaaattcttttcatttattatttgtttatttattgcatccaaaagtgccctatctaggaaatcacctcccaattggggagttaaatctgattccagaggtttaatgtcccttgccaacgcggtcaggttatccaatttttcttccgtttccgtataatctaaaaatgttatttccctgattttatctctgatttctaaatttgatgttgtttttaaaaatgctgttgtaacatcttcaaccattcctgttgccattagagggaccattcctgccaccgctgaccagttaactgtgagtcctgagggagatggaacgggtttctgtaaatcttgcttaataatttgagatattctacaacggccccaacttttatctcccattaaggtcctatacgaggactccctctttatcactctatctcctttaaataactttgttgcccacacatatctgtattcgaagctattactatatccatccagttcctaatcatcattgttaaatattggaattcattaatacttaagtagatactggcatattaagtgatctcaaagaattcctaatatcttgagctgttagaacactagagttgattggcctcattgaattattcagcagcttccttgccacgtctaatacctgcttgagtctaaattcgacagtggttgctatcaactccgctgcttcatcagacagaattgctttatcattttggtatagtggatgtgttttggacaatgccgtaatgacatttccaggtatcgtcaccaacccttccatcatcatctgtttcctcaacgaacttgtagattagtgtacaaatttaacttatctttaacaatatttgttaatttaactgatgacctaatcatccattattcaaatattatatatatatatgtaaaaagtacttgtcatttaatttagaacttgttgatagtatcaacttaagatccttagtggtcaactggtatattatcaactctatacaacgataaataagatttcttgtttcggaatccagtaagcccagattaaacaaagacgagtaaattcttatcaggtattgtgattcccaagagtcattcttcagcagttccttcactaaacaactgttacttatatttttttgttttaatatttaaggtttaacttacacttatcagatattaagtgatagatcctcttatattcgcacttgaatggtatttttgacaacgaatacaacaacttatacactaacactttattcaggctgttcctatttttggagagctggtctgacaaattatctaacaattcacagtaaaatctactatacagtttatattccttatttgaatcttccaattctgaacttttaaagcagttaaccggtaagtgatacgaggttaggtatgataaatctatcagcacgtttatgttatagctctttaggctatttgtttccagaattgttgacaccaatgacgttagtgctgttttctcgtgtaattctgaaaactttctatagaaatacggaaacaactcagtcctatagttaattacgctatcaactactcgttcgattgccggcctatagagcgagtgagctttacactttaaacttccagaactctttaagcgtgaaactttagtatgattatccaattgatccgtcaataaatctaagattagcgcggaatcatatggtgagaagtgcaagaggtgtgatccacaaataacgctaagtatatgagtcttacaatttttattttcaaataattcaggttttaaattacatttagatatataatccttagggatacgccatattttgggatatatatattttacagaactttgcataattataacacatcttatttttcattttaagatgtattacgatacaaatattaaatcataataatatatcttgcgacagaacatacagatcggatgatttaaaaatccttattaaaaattaaagattctgtagtgtctatactgaaaacccacacgatgaagtagattaaatcaaatattatgaattataaaattagattcctataaccgtccgtctatattcaaatatttgttttagattatctcaaattccaaccttttttgatggtctacagcctttgttacccatatcatttcctttaccgtcttttcatttacacatattcgttctatctatccgatcttgattatttttctttgccttatatattttgacgctaattcctctccggcgattgctgctacggccttttcgtaatacgaataccttttctttagcttaaattgttctctatattccttcaggtgtttatcaagattctttaattccaactccataactctcctcctaaatcatttatatatgtttaaaacaagattttcttgtaaaattaataaaatttactaaggtttaagtatagggaacaaacctgtatgcatttctataccagatctttggagcaaggatctcccgatcatggtaatgtatcttccctgtatagtaatctttatcccacacccatggtaatcctaaacgtcataattatcttgaaaaataccattgaaatagaattgtttctctatatccgctttgtaacgcccagaaagcctgaatctcttaaacatgatgagaaatacctgggagggtgattttcacctagttcatccttcaatggaagaaaggcttttggaattggatgtcttcttctcccacctcttgcataacaagattctggattccaatcatcccaatttctgaatttttataaaaatatttattaatggtgtgtaaaaagaaaatttattctaaataaaagtatgtaaaatagtacctggagggccaattatctaatctatatctcttttctttatttagatttacataagggttaaaagttggacagattctaaccccgttaatcatgtttgcctggtattcacgcctcggtgttccagagcattctgacatataaactggtttaaccctttcctttaaaatttcaaatcttgatctccagggcagttctcttacagctctgttctatatatttgtcatataatttacttttaaatataacttacgacggccgtagagattatctttgaatttgtatcttggcccaattttagcattaattcagatttttatggtcacagttacatgtgtaattaattttactaaatatatgcgataattatacacaatacatatttaaaaattaatggaatgtgtttgtgtgatttcaaattatacaactaataaagatggggaacaatactaataaatgtaaaataaacgataatatttattaaaaaatttattaaaagtttaattttgttttttattttgagttatttagcaggaactcctaaaatttaaaaatgtgttacacaatatcatactaactttaagttttactccagccttgtatctatgtgaaactttatttttttcttcaaaagttagctcagcaaatgttttatcatgtccttggggttgaaatatgctattccaactcacatctacatagccccttgggcgaactattgtaccatccgtccttccttggaataacttgactccattttcgtccacatacccaaatgtgcaaagagaatagcctgatttatcctaaaacaaatcttactttagaataattaagttaattgttgattatatattttctaaaacgaacctcaaactccgatagaagattatacacacccaacggtccaacgttcaacaagaaatgctttctaaacaattaattatactataattgctgttttattttagatacaataaatgaatgatgattagctgtgaatttatgttaaggtgttacatataaggtcctggtaaccctttgaaagcattaaaacacaaacacgtatcttcagttattaaaggcctctttaaaagtttgtatgcttccttagatttagctcgtgttatttcctctgggttaccttgaatttcagtaactgaaatataatataataaattaaataaattacgttctactggatcatttttaaggtcaaattcatctcccaatatgtattgtaaatctctgagtttttctttattcgatgtgcaaaacaacacttcctttttcgtcattcttcaaatagaatcttccactcaaatattaaattccatagcattaaatataacattatattcatttaaactatcaattttatttaattaaattgttttttagtgatataacaattattttatatatttaattctatgactccaaacatctgctacttccaccttctaaattcccaaattactacacacattttaaaaatatcaatctaaaattaattgcacatacttacatagtgtataatattgaaaacacattaaaacaacaattgtagctgatatacatattctacaggtatcttgatgtttgtgaaattaaatgttagctcaatatcgtaattattctgatattttgtaatgtactggtttacaaaatccttctctaggatctggttattgttgtattggtatataaagaagttgtaggtgaaaaaatacttgtggtaccagttgaacaggactgtcagtagcaggtttttgataaaaagaaacgaatttggatatttgcccaatttaatgtttattagtgagttgtagacgtaatcaaatattatcttgttcggaaccgtgtgaataagtataggaaatattgaaaacacaaagacttgtaaaatccttatattgttaactttactaattttcgacaacaaaaataacattaaatacaaatcttctaattcagatcctgatgtttgcttctctctttcattacctgtacttgttatttcggaaagattgtatcctctcataaaatacgtaaacaatgactttttagagtctgaacccacataacacactatgttattgtcgtttgttatctgtttacaatttaagaggtacaacacaatctcttttgacaagtattcatattcactcagttgttcatactcaaccaaaggcattgtaaagtttctgtaaaaattcctatccatgttaacaactgggttgttgtagtgcttgacttcatacattcttactaaaagctgaatgtacaagaaataatacctaaaccattctccatgctcaaacttttccattactcctgattcttctccttcatcagatatctcttcattgattatctttaacaggtcctcattcagaattgaaatcacgtactcatgattagtcagtatttggtttaattcgttatcactcagtgtcagattatgtttaatttggtagttaagcttaagctgcaaggttgtgaacgacgaaaagaaaagaagcaaattgtttattggagatatcctaataagggaatttaaaattattgggaacttcccaagtctttcccacaatagcttgtcttttattatagtttctaaaaccagtcttgtattatccttttccagcgttgaatatgcctgagtttgtttctcatttaacccttgttcctctgtattcaatttctcttcattctcattggactctaatgcttcagcttcctccttatctgactcatcaatttccattaggttctgatttccatccttagcttttaatttaaacatcctatttattgagttattgaatagctcctgatctgacttattatttacactcgatattttactcaataaattattcaatatgtccagtgcagtgtttaacttttcttctcttactttctccattttaaagttgttttcatcggagttcacagtctgattatcctgtgtctttgtttccttattctcacaagttgtcagtttaactatataataaagtagctcgtacagtaccagttcattattagaatcatccctctcattatcattatcctctttaccatcgacaagtccactaaaactatatacgtcactcagtatttccaataccattgcatcaaattcttcttttcttacaattttcttaatgtttggaaataaaactgctttatctggcaggttaaaatccagaaataatgataatgtcataatacggtctatcatgtatccaactttacaactcagtccatcttcatttgaatcctgtttatcatcccttttattatcaaacaattcgaaattacatctatataaaagtaaactagttccagcatcatctttctcaccatttaagtgtttaacattattggaaagttcataattgggtaattcgtatttgttgttcatcaatttactaaggtaattcacaaatctttcatccttggtcattatcgaggtcagcaatttttcttcagttaattcttccgggccttcttcaagtagtttctctaactcatcaattggttctggaaatgtgaaattatttacatttttataatattgataattgttaaaaaactccacagttaacatgtatgactgaatcaagataaatttggtcaaattatcgtagacaacgtttgacaatactgtttttttatatcctgtccacttaaattcatctacatttgtatctgtcttaagtcttgtaacaactgtttccttcactgggttatatgaaatagatatattggccacatttaaatttaaggcatttacgttcacattgtacagtaggagcaacttatacagataactctttttaatagtatccattatttcctttaattgtggctgttcattttcagagactaccttcttaaaactagtcatgacctgcaacattgctgtcactacaaacgaggatatggtgtttaagcagaatgtggttgtaaattcagtgttgtaatgataaacaatgttctccaaatagttaataatcatcctcagcatctctacattattgttaatgaagtatgttatcacatttatattcagtaatacatcaaacactcctgcacctgatttctcaaaatcactatccaaattttcatttaattccatctttaaagtatcacagaacttattaaaagaagtaaacttatcaaacaagttaatcagaagtaggactgaattgttatttgttagttttatcagatttaaatagttattgttttctattctgaccagatcctttttatctttgaccattaaagagagtgaagagttgtaagaaaagttaaacaataatacatccaatattactgacagctttacatttgctgattccagacatgaggctgatatacccaggttattcatcagtattattaaaaagtgttcgacaaatatccccaaattattattcttttcaagttccctaacaacaagctctgaactttccttattactgctcaaattattaaaattaatattggacctcaaatactttttataaagcatatatgatattctaacaactactgacaacttttcaaactggagtatgtttttacttatctttagaaaattgttcaaataccaaaacaaggccaccctggccaggtactgcttacttttaatatcctctgtactaacattcttgttaggcaatgacagcaggggaaacaaattatatatatacttaacttcactgttacttattagtttaatcatattattatccatataatttttcctgaatatggtacttagtactgattcttcggctttcagcttgtttaaacccataatttcacctttaccctctcttacttcttttgaaagtaagtacgaccatatatttaacttaattgactgtattcctgacaaacttcccagtatcctaataatatcatgattcatatacttaatcaagatcttttttccagagggatttaaccagatttgtatcaacaaatcagcggattctcctcttaccaatattcttgagtcttctgaagactctatcaggtacttcaaggtcatcagaaaaactgcaactgtcgtctcttcgcactccacaaaaatgtcacagaagctcttcagtgacctgatgagtgagatacagcaggttaggtacttcttatttgtcagctttagcgggttgatttgggtgactatgtttgttataatgggattccagcagtctctattctggctcaaacatattggcaggaatcgttctataaatctctccagataataaatctgcagatcacacttactactgtccagcaggtatgagaggtttaaatagaatatcttaagctgttgcaaggtcaaggttggtagaatcgatgagattattatgatgtaggactcgtcaggacatattaaagagtaatatcccagcatcttgagtacagactcgtttatattagtatacattgaacctaaatgcttaaatatcatggcattgttgattatgctgtttacatccaacattctaattaacactacgtttttatcttccttattttccatcatttctgatggtccatagactttatcgttatcaaatatgtatgttactcttggagatgtatcccatttaaccaacttgtacccttcagacacactggttctataatcctttctattatcacttacaactctcttaactctactatttaccaaaattgatttatttactactgacacatctgagtcttcattaaaaaatttccgaaactttccaacttcccacaccaaatcactaacgtttgtgttactgttttcaaagctcaaaaattctttatatccattcatcaggaacatgaaaagcaaatatctatacactctgtccgcgttttccaagtaagattgttcaaacttccttaatctataacccaccctaactctaaacattgaaattaaagtaaatttgaccttatttgacactctgttgacctccttcaggaccttgtaaagcctttccagccttaatttgaagtgaatgctttcatattctttaactgaacttaagcccggtttcaaattaacttggtgttgttcttctggaaaattaattacaggtcctgaaaccggactgtcaagtgctttcattggtgcctttgggaatggaatcatgttatcaaaaactacaggttgcggtggcatcatcataggcatcattggttcttttggcccaaaaggcattctttggggtcctgaaaatggagaattaatgaaattctggtgaataggtggcatattctgcatatttccaaccattggttgttgtgggtttaacattggcatataaggtcccatttttggactaactggaacaatctcgttaatatgaactgggtgattctgaataaactgtttattttgaaactcctttctgaaatgcggtgccaattgtatccttttagggaacactccttctctaggccttttatatctaaaatttgtttgaggttggggaggtccttctggaggagtcctcctgttaataagttttagatttgggtaggtaggggctccaacaggaggatatgtcattggttgaattggcactggtctatcttggtatgttacatgatgcggtgttggttctcttgggacttgtgatgtcggttctttcatcataagtcttggtttttgggacatatacccacctctttggggcaaatcccttctataacccctcttgtacattatttagtgagaatcaatgattaaatactcatttttaaaaaagattgttaaaattattgcgattcagtaagatttactaacaatgaagacaaaatattatactgtaggaataatatggatatatatccattatattaaatctatatattattacatgtacaaaaatctataaattaattaaaataaaatgaaaaggtgttgattttctaaaaaatatgtatgtgggtaggcacacataaaacgggttaaataatttagatagactaaaagtatattttgttatttcaataaattgattagcttgactgtaactcagcagttaggaggttagttgcattttctgactccttcactttgagagtgcgaccttcctcatctcctgagtagttgtgagattccatcaactttgttaggtcgaattttggcttcttcaagactttaatcttcctaacgagtacattctgaagagggaaaatcgatttacaggccttttctatctccttcccgatggattccgggattaccttcttgacaagttccttaagagtgctgttggaagcctcgtttgtcattactgacaccatcttcttgtgaatcaaccttactttgcttgttctaacatagcaagtagatttcagttggcctggtcttctttttgtatatcctacacaaaacagcctgaggttgtatccatctagtgtcttgacatctgcgaatgcctcgattagtgagtaatttttcctaattaatgaacaaagcttatcccttgtaacacttgtgccatggaagtctgtaaggcaatttctaccttggacgtcttcgcatgataacttgatcttacgataggcttgatcttcgtctgcgtttaaatctgccagactcatttcaaatactctgcccttgagtccgtcggttgctagttttgttccgactgtttttgtaactagggtctgtccgaagttacgaacattgaaggttactggtgctttgaggttataccactccttacgggaaaaagggtctataaccttcttcttggcacccttcttacccttactgactcttttattttttccaactgccatattaattaaaactcgtttattatggctagaacagttttattattaaattatttgtgattaggatgaaccctcacaccacaaggtttaataaataaatatctattgaaaagtgaaatctactggacttttatttttactggagtatgaatcaaatccaacatacaaataattatgtccttaagtgacaatttaatgttagtaataataagccccatccgcggttccccatccataaatgtattgatcacaaacgtagccttcatcccatccttccttatttacacatattatttttcctataatattctgaattgtcattatatatcctaacattggattcaattttggagaaaatccacttatggattccatttttatttaaaattatttatttatgtatttatataacactattatcaatttaatttacatctaactacttgattttacattatttatgttatattacacagaatcctacatattctccctactaatccacaagaacaataatccataaaattcgataaaaataaatatatataaagtataaaattcaaagtaaacaatattatatcatttatgttacatattttggacaatgtgtagttaactaaacgtcccgatagacagaatgttacttagaccagaaattagattgacgattttgttttagttctaatcaggttaaataattaaatttatttcttctttgctgccatttttgccagaagcattttcctggcctcttcatcttgcctaaataaaattagtaataatattattaattttagtaacctaattaatatacagatgtgtgaccaatatatttacctttttaattcagcattcttctttttatattcgagatcttcttcagttagaacctcaacctttttaggagccttgaggggcttctttttaccaccctgaaagaatttatttacgaaatagttatcaaagtacctgagtccctgctggcattatttacaaaaataaaatgaataataaaatttaaataatgttttgtttgcattttatcaaccactatattatgattatgtatacccattattcaataactactgtgtatttggaataaaaattcaagatgttattttgtttaaaaatggaatttatttgtacaaatttatttatggattaactttagaaattattcctgatgccaccgttcttcctccttccctcagtgcgaatctaagtccttcgtgtagcggcatatggtgtaaaagcttaatattacacctcaagctatctccgggagcagcctaaatcatatttgtgtgtatataataaggaattttaaccacgaagaagagataaataagatactaattcatagttttggcattagttaaaacttaccatgggcacattttctggaaggtggactgaacagctaatatcacctgttcttataaaagcttgaggcctatagtttgagacgaaagcattttttcttcccccttcttcatgcgtcaacacatacaaatctgcatcaaacgaatcatagcatgaatattttcccgggcatgttataacaaatcctcttgaaacatcgtcttttttgacattttttagtaaaattccaacttgatcccctgcaattccttcatccagagttttcctgaacatttccaaaccgacaactgtactttttttcccggccttcttccctccaataatctcaatggcatcacctggtcttatctttccctgttcaactcttcctgtaactacagttccttttcctggaattgacatcacttcatctactgctatcaagagtggtaaatctgcttttctttcaggggttaatagatattcatcacaagctttaagcaaatctttaatagactgtactgactctgggtcatcatttagtgcttttgttgctgagcctttaacaattggtgtagagtctccgtcatatttatgctcagaaagtaattctcgaatctctaactcaactaattctaacaactcaggatcctcaaggagatccatcttgtttaaataaactacaagtctgggcactcctatctgtctggcaagtagaatatgttctctagtttgaggcattggtccgtcaggtgctgaaaccaccaaaatagctccatccatttgagcagctcctgaaatcatgtttttaatatagtcagcatgtccagggcagtccacatgaccataatgtcgtttatcagtttcatattctacgtgagtggcacagattgttatacctcttttacgttcttctggggctttatctatagagtcgtacggaacgtactctcctacacctgctgaactgcatactttcgttagggcagctgtaagtgtagtcttcccgtggtcaacatgacctatggtgccgatgtttaagtgctccttggttctaacaaaagtaccgatagcaaaggtgcgaaaaccacttcttataaaataaaactctttatttaaactaagggttctcttcggaactatactagaaaacccacatgaaataaaacttttaaatgaactacattggtttggtctaatttttaaaaacaaactacaattgaacatcttaaatgttaatttattaatttacaaataatgaatagatactttatgtaaattaaacaatgaacaattaattatggagtggaatccttcacgcaaacaccatattgtgttaaaacacatattgaaaatacaaattaaacaatatttcattcaacatatttaaataaactttattcagtttgagtttctttttctaatccgtcgattccaggagttcttcccatgttcccctcttaaatggatcaaaaaccaacattttcatcaccaaatcaattagttctgaatatgatactctataaccttttatcttacctcgatttctttttttcatcatctccttaaggtcattaatcacatcatcgtaagccaattgctgttcctatgtgtgtgtttggatatttgtttacctaccgaaggaatctttagggttaaaaggtggtaataaatcaaacctagagaaaaaacatcacttctgtacataaagggcttgattttatccggaaaatcgtaacgttcaaatctcgagtttatttcctccatcaacttatttgattcatttgggttatggtaaggaacttcatttgtaagtaatagaagaagctcaggtgatgtgaaattggggtgtgtaagttttccttgactaattttataacacctctcaatgaataacgctaaacttaaatttaaattttggactaactttctggacagaaatccgtcagtagaagattaagcccatctttagatattaatacgttattaggtttaatgttattatgggcaattccctgtttttgcatatgttccattctaaagaatgattaaattagtttctatattatgacaaacaatgatatttgttcctttaaattgcgatgaagaagtgagtcttgtaactgataaatatcatccctatttgggagtgctttcaaataattctcaactgatccgttagccatctcctttctgaatttataaaattatttcaagaataatcaaataacttacgtaacatataaaaccgcccatgtatcattaaaaggttctcttttcctcagaaccttttctatactcagaatcttcatgacagcatctttatttgaagtttgatgcgagaatgcttccagttcgtctctaattttctcaactaaatcaatgctttatgagttttatcaacattcatatatctaaatagttacaaaccttccttttggatagagttaagttggtactctactgttgtggactgatgtttctcattaatacaactgttatcacgaatcacaaatgggtttagaatctgtgctttaaatatcttgaaaatcttaccaattttgcataacagttgaagaattccttgttttctaaataactgtaaatctatttacaattacctttgttatcgctcttgtcactggcatcagtggtatcactatctctatctgacccagaatcctaagaatattataacccaaattactaacatatttattccgcagtttggtcaattgtgattcaatctgaaaaattaattaaagaatttgaaatacctcctgtattctatctcgaagctttgttatcactgtgtcaatctgaccaatttcaccttcaagattataactatataattattttagaaagcaaatggatgtataattatcgaaattactcgtaagaatcgtaagcttcatcatctggcagttccggtcctcgttgttggtttagttcctcgtaccgatattcaaaggtttcaagctgccttttcctcttttttctatttgatttattaatttcaaatgatagtcatttcattttatttatgtttaatttataattaatatgaaatattatcagaaattagactaacagctcttcttcgagcgacttgacaagattatgggtaaagcaggctactttccagcaatccccaatttgatttgagcctaaattaggtattaatcaagagagaatacttattcaaacttaccagatactagttttattggtttaaattcattaggccaagttatttcttccttttctaacaaagatgataagtctgacatttgggaccggttaaatttaattcttttcaaatttcatgatatttagtatttttatactagttaaatgttacacattttctataatggaattatttttagagataaatcaggtattctggtggaaggaatgtgtaaaaacaaaattcaaaaaatgttaaaaaataactaaattttaaaaatgtatttattacaaatgtatatgttttagaaaagatattgaaataaaaaagtgaattagaagaattatgggtaatgtgtaatgaaaagttaagaatctgaatcactaaaaatgacagaattcacagaacttgttatttcacctaaattggattattttcagtttaaaattacctgaaccgctccaggaagaacgctttttcttgtatttttgggatttgaagtcctttcctttcacagagcctagttcctcagcagccttcaaggcgaaggtatcattcttcattttgtaagaattagctttcaattcttccttttctatcttgtttaaccagacatcgtcttgaattctcctaaatggaacacctattaaaattataattgtaaaagtaatacctgaaccagtagccttcttttcgtttttgtcagtactagaagaattatcagaagactcagaagctgaagagtcggatttcttggactcttcaatggtgccttctaaaccattagaagacttaacgaatccattcaaaaccttttgtaactcctcagactttttggtttttgtttgggttttgtttgggctgcgttttctctttttgaacaacgttgaaaccattttgttaaaatctgcatttttgatttcttctggaagatgcttcgctttcagctaaatcaagttaaaattagttgtaatcattaccttcttacatttcgtttcctttcttagtctgttcaaggtttttctgagtccattgtcagacaatatcttaacaacagaaaacaggagagggctgggctctaaaacttccaaattatcagaagacatttaacaagacaacttattaaactattatacaaagttattttacaaaagtatagtttataacaaatttaaaagggttataacttgaaggaattttaatttacataatttgtacataaattagtaacaaaagaaataatttatataaaaaattactctaaaatttattaaaatttatttattcgtatacaattttaatattttaaaattgtttttactaagtattccacaacctaacactatatactgcacaaattagacttttccatcaaatcgtgcaagatctctaattttaataaattcaacaggaatgttgatatttaaactgaaatgattagcgataaagtccttctaaatgggaaggatcctcatgaattacgaatcgattttttaattaattcttccatattattatgtaacaaattgccatctgtttcacattccttgatgtattttcacatagatattttttatatatcttttgtttaactttattcattcaggagaacctctatttgttttttaaaagattctaaacgaggtttgttctatttaattcttaacacattctcttagaattgagtaataacgattatctaaatatttgtaagaggtgtggagttgtttttactccatgtgtaaacctagaagttcgttgtgtcaaaaatgataaaaaggcaagaaaaaggactaaaaaattatttaaaagggatttcaaaaaccttgatacatttaaaaagaataaaaagaccttgaaacaaaacctgtattataaaaacagaatggtaatttgcacaaagttatcacggttttaggtttacaagtgcaaagtttgtaacaatatttttaatctaccaggttcatcaagaccctttaaaaccactaataaataatttcatccattatatatcaatgtactacaaagtggcaccagattaaattttgatatcacctaaaaaactcgtgctggatcgcttcttccgctgttattcgcttattcggattcagttctaacattctaagcattttaattagttgaatataaatgatgtaatataaaagtaaccttaataataaatcaactaagcactcatcttgacttagacctttgaacatttcatacttgttattacaattgatttcaacgttctataattaataaatctattgatcatgaggtattatatatgtcttgaataggggtttgtagtgattgttagtctgttatttaagaataacataccagataaggaaatgatgaaatttgagcccattcagattctgtaggttttccaaaaaccttaaaaattgagatcaataacccgaactcgttgttttcatcgaacaattgttttcctataattccattgtattagtccttaaattattggaaaatatttaaaaatagttaaattttgacctgttaaaagttcaattaatatacatccaacggaccaaatatcaattgaataggagtagaagttgtaacctaacaacagttctggagccctgtagtttaaagtcacaacttccatggtcaactctattaaattattaattaaaatactatataaatagttatctaatatctaggtttagtatagcaactatttcgttacttttattcttttgatacgagtggtcaggatcaacttgacgtgataaaccaaaatctgataaaattactctatctatactcggtatactaaataagtctctattaggcagtttattcgtgaaattgaaaccatttgtcaaattttgatcaatactgtcatcaattgaactaatatcaatgtaatcatcttctatgataccactggtattatacatatcattatgagtacacttaatattgtcgtaatcaatgagtctggcattaatgttgaattgatctatagatattaatatattttctggtttaatatcacggtgaattatgttgtttgagtggcaaatataaacaccctcaagtatttgcctgactattcgtctgaccaattcaatctccattccatttttgtaatacttgcttgaatactctctcaaattgtaatcaaagactgggaaagataaatatatcctatttttaccgaaatatatcttatccaattctataacattcttctcatagctaaagtagtgattattttcaaagttgttagtattctcgtcacaagttgcaagaaagttacgactatacttgttgtaagagtctccgaacttgtaattaacacaagagctatatttttgtttagaattgaatggatttaaacaggaaagtagtaagagtgagtacatttcacggagcatgtatatgtttaatttcttgtttatcactatccttttaaacgcttttctctcatttgttaaatctgaggatacaaggtaaaccctaccgtaagatccttcaccaagagttttaacatgacgccatttgtaaatgtttacaatatcctcatcctcctccatttttattattttgtttgattctttgttcaattctattattttgtctatcagttcctcttcatccttttcaacttgtttcatatcaacttcaacatgttgttgttccctttccatgttttccagttgtaacaattggttgattgttatatcctcaaaggataaccttgagttgttaattatttcatcgtttattaaatcgtttattgttgtcctcaatttcttcactactttgtcaaaatctaacttctctgtatttatcctcttattcatgttgtttaaactgttaggtaacccgtattccaagttactttcaagctctccatccaacttaacatcacactcaatgtcgtttttgaaattaacatggtcgaaaaaatatttctttttcttgtgctcgtgtgtgatatcattgtgtattaacttcctcttatttggttcattatcactctcgtctgttattataggatttctattgttaattatcactgatggatcaatgaattcagcgttattttttatcatttgtctaacaaacaataaaatatcaatattcaaaacgtgtttattggattcaacttgtggaaacattttgaaatgtgttaaataaaacctttaatctaaataagtaaataaataattatgtatcgcagaataatcgtattttcaaagaatggaaaatttattcttcaaaaaagaattcaccgagaataattccactgtcacattattaatttttgttaacaaagcggaaaataacaaaaatattaaaatgtgtaaactaattatataataaatgttgttaggaatcttggttattcccacaaatataatttaaataacgttcactttataaaatgggcataaatataatatttttatttaatttgacttattaatggtagaaaactatggaaaacttgattcttactcccctgggagctggtaactctcagtacgtcgtaagagttaaatcaacttgtaaaaatattgatgaaacttatgaaaatggttagattctccttattttaacattttatttattattccatcacacttaaacctatttattttggtttagtatcccaattcttataaaaataaacatcattttttagataaacctcgtgattttgtcctgaagataacaaaatatggaactatagagaatcacaggtctagactattgtttcactatcgatttgtccagtttttgaacagatttgatgcagataatcccaccactgtagatctaaatgagcgaaaagatattcgaaacaacttgaataggcaaaataaagttttatgtatattagataggagtgtgaccacaaaaattcgacaaaccttcatgaaactactaaaaccgtcagatggttctggcccagaatgtagtgaaagtccagaaaatcagaagacactgattttctacgataggaacatagaaaagaactattctattactataccttctgactcaataataaaattaaataaaaactttgaagttgactctcctgatcataaaaactactttaatgatgacaaatacgaattgtgttcaattgagcagaatctattcaatataagtgacttcatttcactgaacaataaattattatccgactacatgacatctagaaatacagacccattacacacaacaaacaccaatccaacaagcaaaattaatgatttaaataaatataaagacaatccagaaggaaaagaaaggcttgaggaggtagtacctttcgataacatcaccctggagttgaagttaaaatgtggtttacttaactttagaggcattccaagcctatttaagatgaaacaagttaaaaagaggaatatgaaatacgtatttacaaatggttcagttgtttatacaaataaaagggaatcgttttttgagccatgcaacttctttaaacttgaatacgaagctattcgagctgaattaacaaaaatgatagattcacatcaaaacaacatgagagtcttcatagataacctagaggttattccaacctctttaaaagataggagtgatttactagatttaatatcagagtctgtaatgcgacacaaggacattcttgaaatcatgctaaaactacagtctttggcagcgggtcaccaatttcttgggtcccttttgtattccatactacatctttactttatattttcaaatcatactaattcaatcaccaatactaatttaattaatcattctaaacataccaaagaacaagatcgaagggtttctgacacaaaccctaatatgatgtgggaaaacaaaacccttattacagaaaataacatttctgatataacaaatatactgaaaagaaaccttttgtacaataaattcaccaaatgcagttcttacgacattcagcccctattctacaaatgtaagtttactctagattaggtttttaatttactctagattagtctttctcatcactaattcaaactaactatgattttttagatggtcttaaaatggtatttggattttataaaaacctattaagcttactgagttccttcaaaatccggaaagcctgcaacttttataccaactatcagaacttatctatctctcgaccacacttacttaggaattcacgttctacaactcacttcctttataacttaaatgagtaccctctgtactcattattacatgatttagcctatcacttgattacatttaataaggaacgtaaagaaagtactaaaggcgttgattttgtcttattggaagacaggattgttaaacttctggttaagacgctttatacaagcaagttgaaccccaggaatgccacgccgaattatggggaaaaaccaggaataacgcgccttttcaaaatgaatgacttagaaaaggaccttggatcccaactaatgacccttagagtagaacagaagttcctgagagattggttatatctgtatctgtgtggaagagtctctatggatctgtcggccattattaacataatatatacccaaaataacaattgcaatagcgattgtagcaatcagagcaccgaagatagaacttttagttctattaaacaaaatcgaattttagtcgatggactatcgtttatagatatcgacttgaagtccacagcaaatatttttaagtttctaatagttatttaaatatctatcagtatattctttgattaatattaattatagatggaaatatgatttacttgaactagtcaataattacaatcataactcttaatgttatatctatatatttacatacaatgtatgaatagatatagtatatgcatgtaatgctatatacacactttggtatgtttctggtagtacacacttattgtctcaaaacattaaataacatgtatggaataaacaggatgaacaaatattataaaagagtgcatggttagttgagaattatcaatcgttattttgattcttcaagtgccagtcaatgacagtatcagcaaggtcaacagtgagtttacttgcaccacttccataaatagcactttgtagacttatacacagctaaaaacgggattaataagtataattataaatataactattaatataccttggatatttgtcgtcctgaaagcccttgagttttctttgctagctttgcaaagtattggtcgttaataccctcgtcaatttgtacctttgaggttcgttttagagggtttattacatattggtacatgaatattttaatcattcttttacgttcctcttcttcaggcaagtcaaagttgtaggactcgtcaattctatcaaccacagccttgtccagaatatccttctcgttggtagcgagaattagacaaaaattgttattttcgttaccggtgtggtacaaaaacgtctaagtcattgtttaaacaattagttataggataaatatgaaataaataagggatgattattgttatttttgaaattctgtaacatacggaaagagcgtttcgaatgttctctgacattccctgcagtgttgaacggccttgtctcagaaaagcctcagcctcgtcaataaagagaattagaccctttttagacttatttgaccacttaaacagtttatttaactcggttacagcatcttctttcagcggtccaacgtcaccaccagtcatgatggcatagtccattccactcttcaaggcaagtctaaagttttattatatcccaagagttttaaacaaatgagaaccatggatttataactatttataactatttttaacatacgtttttgcaaatagtgttttgccggtgccggggggaccgtatagtagaatattcctgtagggcgttttgttttccttacacttaaggagtgagttgattgaccagtttaagcgttcgcttaacttattgtttaggacgatttcattcaagtttagttccttcttcttccccattaatgattcccagaagcttctgagattattctagcaatataataattatacaattaacttactgttattatggatttggaggtttcacgaactaatgacggtttaccaattttttgttcctatattgaaaattaataacttaattatatattaaagactataaagtagtagaaattactattgtatataacttacaatgacttttcgagctactttcgtgccattttttgctgtgtaaacacccaatgacaagccagtcaaagtcatgacctaatttaagttatattgagaagtttacatgttaattcaagtttaaaatcataccgtgtatgttagtcgctgtttatcgctgagtaaggagtacaatcctgacccaagtgaggaaaagattatgttcaaggactccagtttggtttttcgttcctcaactgagcgttccttcatcatcctaaatgtttaattttgttaaatagttttaaataaatttgttacttgaggtgaatgtcgaaattttctctttcctgtttgattttgcccatgttctcttctctaactttagcgacaaggttttctctctcgagctccttttcttgtttcatttgttctttcctcatgttcagaatctcagtttctataatttataaatattaatcatacaagttaagctggtgtataaattaagtgtgtttataaatcaataaatgaaattagtttgacgaacctgtttttttcctaatctcctcttgttttagaaactgctggtgctggcgttgcaaccactcttcattttgttttcgttggtcatgaagtttcttttgatacatctcactaccaattatttatttgtgttaattaagattttttaaattagttttgtgtaaatatattatttaaaacgcactcctcaagtttggccttgtattgtgccgtaattctttcttgttcctgttgatgtgaaagtaactttttacgctcatcactttcaacctttgccttttgagtccccaattcaccttgcctcaatctcatctaaattatatttggtcattatttaacaagctttatttgtatatatagtaagataataacctgttcaatttgcatctgcaactcttgttgctttgtcatttcctggagctttgtaagctcaaaggccttttgtgagttaggggaggagtctagcatttttaacgccttggctccacgctccaaggctgtgggatcgactacattaattagttaataaaattaagaaattttcattatttgtaactaacactttagttgtattaactgtataaataactgttaaaattacattttcctgttatattgttatcatctttatttgacgatggagctgggttcggagttggaaaactccttccgaatccaaacgttgacattttggaacaaatctatattttacaccttttaaactacattcaaagttggttttgctgtgttatttcaactacattcaataaatcagagttattagtacaatttaatttatattattggtatttatacaggtttaatttatattttacaaagaaggcttaatctatggtattatgattaaagattccatatgtttgacagtaaaatcaatattttgtacatcttaaactagataattgatacaatattctaatatgtgtagattaatatgaaaattaaactaaaattaatttacaaaatgaaggtagtcatcaacatgaatttacacgccctactcatataacttcaaattattatatttattcattgtatttttactaccataccctaatcgcagatatatacttgtttatttttaaatgtattttttattctaaatctgtatattattccttttttacaataattctttgaattcatttcacattataatattttaatctatttttaaaagattattacactgttataatatttaatagaatgtattttatcgaataaattttatttaaatgagtgatgacgtggtttggcagttaatcaagaacggattttgttcctttcggaaaacgtaagttaatttattcacaaattctcttcagaactgataataaagctttttgtaccaatgtatacaacgtcactgggctttgtaatcacgctagttgtcctctagccaatagtaactatgcaactgtgattgaagatcaaggtatttttatttacatgtttaaaataattttacttaaataataaataatattaataatctgttttaggtgacttgctactatgtctgaaaaccgttgagaggtgtcatactcctagagatcaatggcagaaaattcgtctttctaaatccaaaactgaagctttagaacaaattacacaggaaactaaggttgggttccctaatcacctgactactaagtgtaagatgaggtttaaaagactccgtgaagtcctaggtaacatgagaaccatggcactgaataaaaagataaaactactcccagttaagaagaaaactgaacgccgtgagtcagttcgtgagaagaaagctgaaatcgcagccaaactcgacaagagtattcagcaggaacttctgaacagactgagtcagggcatttacggcgaactatacaactttgagaaagataaagttcctgaaaaggaagaggagtcggaacccgacatgcttgatgaaaccaagcttgaacccctagttaagaggaagagaagagggcgaaaagtgaacattgagtacgaaaaggaagaagaattctacccaatggaactaaattcataacacaaccatacacaacattaatttaatcatagtttatacatattgtacacaaaaattaagggttagtgttcttaaatctcaaattttgaatcattgaaataattttatcaactaaattcttcatatctttcatttttatttctcgatcagtcaggcttaaatcaaactcgtgcgataaatctgaattggtaaatacctgcataaatattggtaaatatgataaaataagtaaaatgcgttggttaaaaactattgtaaaataagtaacaatgaatatgctgaaagtttaccttggatagtaagtggtttatatcaaatttaaggggcagtagttcctgattacccatctccatcagcctaaggtagaagtcgtataacataacatccagtttataagggccatagtctaaaagtatgtctgaaattaggttatttatggtaacttcgatttgttcagatgttttagcctggagtattatatgaacgagcgttctgagtaatttatggccatatggaatcttgtgttttctgatggcgttcatataatttttttgagcttcaactactgtattgtaagtcaacataacgtcaaaatcaaccctatttacaatttcagttacattaagtctagataagcaccctttaatattattattggcatttttcatgctcgttttgtggatgtagtctataaatctatgtttatccagtccaccaattctaaacatcagggaacaggactttattcttgtatcaaggctgtttagcctgttacacaggagaatgaacaccttctcatgcatggtatcaaaccatttattcataaaaatttgataacagcctgacaagtagtcaaaattctccaaaattgttactttattgtgtctggtgagcattagctcctttaattttaccaaactcagcacttcattagtcagcagttcctgaagagctttgcagtcaaaatggtgaaccttcctgttatatattacaatagcttcattttctaagttattctgtgtggaaaacagggtcttaaagtcacagtcgaaaacctttgttagaacccagtatgacccaataaagttgttcctgttaccgtaaaacacaaacacattgttccccaaataatatttagagtcggaaattttcggggattcatcaacgctgccttctgatgtagctgaaatcggttgagtatcatcagaattagcatcttgggcaatgtctgcgataacactttcaaaatcggagcatttgctcccatctgagcttaaattatctcctgtcgaacaattattaacagaagctgtttctaaaaacgtatcatcgtcttcccctaaacaatcgaaatctcttatagggattgttgttccagttatggtgttcaggtcgacaatctcaaaatcggtatctggatcagaatcggacgaaaaggataacatatcccccgttataactagagttccaaattcatctaaaaaaatcattatatatatttataaaagttgctaactaacctatatccactggtactatccttttggaaggttcttcatccacttgatgatctacacattcttgtgtatctaccttcttttcatttgtttcacacttagaagtgtcccttttgaaccaattcaggatagtggcgggttgacgtgatctgggaacagatttaaatgcagaaatcttttcatttacgctagtatcaacagaaaacagtaaattaaggtgcgatttatatgtactatcagaaagcgcagagcgatcaaaaatatttacatgtgtattgtcataaaggtttgaaaatttgtcctttatggcctttgccaattttgttaacactccattctcatctatgttgaaaattttttgagaaatgattgtttgggtgaattcatctaatgtaatacttccattttcctcaatatggttaatcataatattttattaactaacgtatagacaattatcctgtagacacacttgacactacaaagaatttactaaaattagtttaaattttaattttaaattttatttcacatttatttaatttagcttttcatttccaaattattatttgagccttctaatgtacattttgtgcattcacacacgaaaccataattctgttataattgttggtcaactctgaacacttagtaaactaactttgagtaatttctcttgacgattttcaaaagaatcattttcatcaatatatgatattgttgcctcatctccttcccttatatcacacaacgggattatctacgacttaattatgtcggtgtttaatacatttgctatgttgttttttccataatccacctctaagtttggtgcacacgaatggttcatctttgagataaaattgaagagtcccaaccctattatatctggaaacaattccttcctaagtattttaaattagatttctggttacgattctattagttgattcaaatccttaggcacctcttctactcctaaattacaaataattataattttgacagttaacctctgattattttatacacatctatcaaatcctgaagttttaattatgtaaccttttaataccttcgacaacatataaactagttctttccccttatcgtcctttaacaagttgtaaagtaaatcatttaaaggattttgtatctcgatatcaacacaaaccaggtccattataccctgagtttaatttattaatagttttagaatgtggattttgtgtaaacaagttaccagaagcccgagataaaagcctacagagaaaaggctttcaacatcttctccgttttcgattgccatgttcttaaatcttttaaggcatgtttcaagaatattgaaggattctgaagctctaaaatgatatatttatttatcctaacatgtccagtgggtttgttgaattagagtcaaaagttgaaagtttgtccctttaagattattatgcgtcttaaactaaccatggtatactccaaaattcatttagtttagttatccactctttaatcggcttgttacgataaatagagtcatacagtatatttatgtaaattaaacctaaactattcacttaattaattagttaccagcaaagtaaaaattctcatgggtcttcaaggcatatctaaaaaaatatttataaaattacaaacctttcaaataaccgccatgtttccttttcttcatccttcatgagtttacagagggtatcatgtgtaccagatgccgccttaattattgtgttttagataaaaaattacctctaaacattccttactgcagaaaataaaatcacaatttgaattgcacttcataacttttacaccttcaattttctgttagaagttgtaaaaatattgtaaatttacaggaaattgatgcttgaatgagttaattttagcctctagttcggggctgacgtatttcccctccctaaatatgttttaaaattaacattctcttaattttaatttacattttaagaacatggttcaaattttcgaccaatgatccgatgttcataaaacagttagaacaacatatggctgattttctaaaagtaattgatagttgtatttaaactaaccttgaataataatgtgtgtatgagaatatcggtttatcttgtaatttagactcactagcctttaaatccttaagtaatatgattccattgccttttccagaactaatcaattttgtggagaataaatctccaggatcttgaacacaatccataaaacaataaattacatatctaagattatttttattaaaatgaataaaaatttgatgaacttaagtacattcatgttaatgtgtaagtcccaatataaataagaatcactaaatatttaatgctgaactttttttatgtaaaatataaatctctttttaaaataatcgcaattttgacttttaatattttatgttactgtagaacagtccactcaattagtaaaaatgattatacaatctcaaataatctaaaactttatccctattctttcgtaaattttcgtccttcccccgaaatgtcccaaatactaaaaaagaagaagctggattcttcatcttctgaggattttatccctaccaaaaggatcacaactttagaagagcttaaaaagtattttattcgtggtttaaattaacttttagttacgaacgtctggaggaaaggactaaagtgactattactaaggataagataccattatttgccaaaaatgatatgttcaggtattgttaacaccaatattattgaattttagaaacaccgttaggaacccgttaaattcaattgactactataaaaatgacgaaagtgatatcagaacatatattctaaaaagtaattttaatcattttgactaaattgtgcaggatgggatttgctcccttcacctttgagagacctcatcaccaatgaatcaattgatcattcaacagtcacccataaaataaaatatgaagatattacaacaggtttgattgtacggatttaatatatttagaggaggcctttaaattggtggtgaatgacgatattggagtcatggtaggattcgaaactgtaggccacatagcacacctgaatgtccctgaggagaggtcgtccataaagaaacttatcgcaaaaattataatagatgtaaggacttatttataaaattttaaaatgtttagaaacacaaacacataaaaactgtaataaataagaggtctgaagtccagaaccagttcagaacaatggacattgaactgctggctggagaagagaattacatcgcaaatttggtaatttttgttatattaatgagttttaggttgaaaacggattaaaatttgaggttgattttgcaaacgtttactggaactctaggtaattcacggttcactaatcagtatttagactaattaatgaaagggctaggatacgaggtcttttagatcctgacgatatagttggttagtttccaaatgaaacaatcattgttagttgacatgttcgcaggagcaggtccatttgccatttatgcctcgaaaaagggctgcagcgtacttgcaaatgatttaaatcctattggtatagtttgagtatttacaaaatattacaggtgcaacttacatgaaaaggaacattgaaataaataaagtacatgacttggtcaaggtatttaatatggatggaagggagtttttgatcgacgtcattaagaagaataagatacttgacaaaaaaacgctagagtgtgatggaatggcgctgaaggctagtggaaaagttcacttaataatgaacctacccaaaatagcaattgagttccttggtaatttagtcatgaaacataggttttcagacacattgattggattggcagataatattgaagaggagaacatgagaaagctgttagtacactgttactgtttcagtgcttcagaagaatatgaaaaagagatcgagcaacggttatataaatctattggtagaaaattaccagaatatacaataacacacgtaagaggagtttcacctaagaaacaaatgtattgcatcgagtttgagtgcccaatttcaatattgagggggaataaggagtagaaggatgatattaatgttgaaaaggatagaatgtgtataattatatcactccatatcgtgaaattaattttagtataattttttaaaataatttatatatgatataactttgtaagttgtttgaatctcagtatatgctattgacacatttttcttccccatctattaactcgttgaataccccatcctatgctttaaggaaaatactacagtttactatataatcaatctcttaatttttaaaattatatcctatgtagataagttcatctcgttcttttgactttcaagacaaaattttacttcttttatgccaaacaacactacaaaaaattatttaccgataaaaacctattaaactttttgagttaatacctataaatttatacatctgacaattgaatatggtatgttttgattctcctaatttaaccttcagggccgtgtaagaactaagacagtcaagcgtgctgcacgtcaaatagtcgagaaatactatggaaagtaagtaaaacactcatcaaatgtataattattttttagacttggattagattttcagtacaataagaaggtcgcagaggaagtcgccctgatcccctcaaagcgtatgaggaacaaagtcgctggctttattacggtatgcccaattaattatataaataatgtttagcacttgatgaggaggattcaaaagggaccagttagaggaatctctctaaaactccaggaagaggagcgtgaaagaaggatggattacattcctgaaaagtctgaactcgaagtcccagtaattcaagtggatcaggacaccgctgatatgttaaactttttgaagatttctcttccgaatctcaaagttatgtcatttaacgctcacgaacatcgtgaaagacactaaatagaatattctaattttatctttgtgtaatattcacttctagtgttcattttccctattattttattcatggattttttattacccacggattttccatgtatatctatttatctgcacacagtatgtatgattgtctagcataaaaatcccttaaaattgagtcacggatcattaataaaggttcacacaccctcaaaaatgggactatttcttaaaatttagcaaaattatcaatctacttctataaaataatcttttaaaaatacaattagttatttatcaatagtgtgtgtaagagtaaaagttggtgtcaaattaaaaataaatagggccagatcacattagtattcagtagatccatattaaatctattaagattagatggctatatatcaaaatctattcatattattgctaaaaaataataaatattgttgtttaaaacttctttaacgttaatcgatgttgattctagacatatttgatattcacgattctttcaatattttggcacgagaatcacatatccaccttaaactgttacacatttacatgatccttcattaaattaaaaaattacaagataaaataagtattttctgtatttttacttcatttacctatggggagtaaaagctgcttttttctttccgaaatcttagatcctaaaaataaaattccgatcaatagtaaaaagtcaatttcgtgcatagaacgtgtaaaattgaggatataacagggttttattctgaaaatcccttttattcttttacttgacatcaacatcaaagctctctagatcctaagtttgtgtaaaataccaaacaaaaaattttgatattcatccaaataatttgtaatggctgaaccagtcacagctccatcagaaaataccgattctatttcaagtacagatggatctaacacacagtttggagaccatgggtttccttggtttcatagatttatggataaacaccatcctaagctagttaaaactgctttattcttttctggactaacccttctcttccccctaagaatagggttaaatagtgcatcatactgtcttaaacgatttaaactggacgaagaattctttagtctgtatgtaaacagggttcacaatgctatggagattggttgtatgcttgcagttaccattgggaacatatatgttctatcatatgggaaatacatggaggcaatatccatagctatcaactggttggtattcttgtttgagattgtcttattggttgtctttataagcggtggagtgctcgggaggttaactatgttttattggtcattagtagcttctacatttatatacggactaaatcaagtgtgtgcatttaagatgggaggagaagatatcgtgtattttatggcttccatgcccatttcgggtattttgacatccttcatgcaattctgttttttgcgtgcttttggagacaggaatatttataacactgatttacttgtggtcgcttttcagttgggtgtatttatattcatcagcttaataagtgcgtcaatatggaccttggcatatttggaacaaattccgaagaataaaaattcaaaaaaattagacgattcgaatgataaaaataaaacaattacaacatgttcctcttcaaattcaattgcacaaacaaaaccaaacgactcaaaaggggatggatcaactgatgaaaataaaatggaaacagaatccaaaaagtttactcctcatgcaatttctggaatgttaatgtgtataattggtctcggaataatttatgcagtttacccaggtattgctccaggacagattatggactttgaaaacctgcaaaggttagaaatgataaacttgattgtttcagctcttccatcgttgattatagctttgatttcagaagttacaaattatgggcctaataaaccatggaaagggggtaactctttctggcacggatttattattttcgttatcatcgaaattgcagttggtattatgattatcttttcattacaccacaaacatacagcattagcacgatcgattattgggaaacctgtaatggcttcatttttgacaatgacgtacttcacatgccacattattgcgattggagtaggattcccaggagttgacgccaactcaaacgggaccatcggaacagttaacctgttcctatcactcttgttcatgaatctattagagttgcttggtgaaggatatgtagtggaatacaagaaatacaccgaaaccacctggcccacaggcggaatgactgactgtgaagccttaagattctggcttaggcgggcagctgcaaatgcatggataagcttaaaatcaagcgtaacaacggatgtacgaagaaaattactatcatctgtgagatgacgaagaaacgaattatttattcatggttatatgtatatatgtatggagggaaattgaggtatagttaatagtaagattatgaactgattaatttttaatagaggatttcgccttaattaaaactgattaaggtaggcttttgcttattttatagaaatcagacctgatagggtctagaatagccatttgatggaggacctaaagaagtataaaagtgcactgatacctcttcatctggttttaattttttcagaagccttagaagttgaagagaaggaggttgtaattttatgattttaacgaggcatatactcagaggaccctcacctaaaataatataaatatataaaacaaacattcacagttagtcataatacacttattgtacgatttctcgagaaattgaaccatatctattatgtatgaacacaatccttcattatcagttctctttaaaagcctttgaaagtctttgcctagctctttaaccatgaaatctaaatcaaaatcatctttaaagtacttgaagataaaattcttgtaattccaggctgagttgttgtatacatcgcctgaaactaagaattctacaaattcaagttctttgaacaagtctagaacaccaaatttccgaacaagccaagtcctaactctattaaattaagcctatacttacaaataaccccatgcacactgattcttaggtgacgttgagatctccagtttgacatactcaatctcgttaaagccagattttgctagagtacagatgttccttctgtgattccaaggctgaagtgctatttatctaatcattgtacaaacttggaaagccttaatagattccatagttattttcctagtaaaatctaaataattaatttagagtaaataatcacacccagttcctctctcaagtccatatcaagagatttcatacattcattgcgatagtaccatgccgtataatcagccgagttaaatttaattattatagttgttaggtacaagcccctagtactaaattccctatttttgattagcaccttgaaaaacgatttagctctgaattctacaaatatttttatggaaatccatttttatttattattatctattagattacctagtatatccagtttaagttcaaataataagggttcgttggattttttttcaattaactcaaggtcctcccaaactttatcatcattgagcatatcaaggtccacctcaaatggttcaggagggaagtttagtctttcacaggtaacctgagtatttacaccctcgcattcctttaacacatccaagtcagcctccattgtagctatatactgggccacttatgctggtgtattcccttactgtcaggccaaattgacttctcgtcgggatgggtcaagaagtgacttttgtatttttgctttatctcactaatctttttctttcgagaaactttatccaaatagtagttcctcctcctcaaatataaagtatcaacaaatctatttctagtcttaaaacatttgaccagggaagggtcctcttgtagtagtaatcttagcctattcctaagctgcacatccacttttatgtccttcttgggtgaaaaattttcttccaaagccttcaaagtatctaataaattatcaaagtaagaaattagaaattttttacattttataaagggaaaatatttgggattttcaaactttgaagtgaaacacttatcaacatggaaagttagaggagattctctgaaaattaaataatataaacagaatgtatcttgaattgtaattgagtctgagaatgtgtaggaatcaacagattctaggaaggattttatggaatccttgttagaactaaatttagtaaccgtattccacaagtctaagatagcagggtcgtcttgtttccttttaaaccgtgatatctgcatagcaatataatggcggagggtgaagtccatgtgcaaatacttgctaggccagtaccacctacatctactgggaccttgcaagggtttaagccactcctcgtccccaacaaaacctatttaaacatttaaaatttattttatgtattttaagaaagttttcttgaataactgtacgaaccagtgttatggccaaagattgataacttggcagagttgattgtgttattccatgaatttttatataatttggcgctcctaaccaatttatctaaattactcaaggaagttcttcccataaatttacatattttttactttaattttcataaaattgttttatgtagtgttagaaatgtgtatggaagtttagaaattatttttttaaagaactactaagttactttcaatagggtgaatttagggattctcctgtaagaatcctttgtatttgagaatcttgtgtaactccctctcctaaatgtcaaccatattaattaattacacgtaccaggtgttgctgatcctttatcatttgttcttgagtttcattaaatttcttgagtttctcactaattcttttgatcttgagtgaaataagctttggtaaagcttgacttattctgtcttcctccattgaagccagttctcctgaccttgaagcggcagcgtccaaagctgccttggcagccaattgcagtgtacttgtatctactaggttattcatcggttgagaagttttctgctttttggtaccactacttgttgaagggtcattatcttcttctttcttatcttcagaattcaatgagtgatcgattgaattcctcttcatttctttgaagttttgttctagctctagcatttcattttcgttcactaaaacaaatattgtttactcaaaacttacctaaatccttcttttgatccgacttcggagacgaggtgtttttcctgcacgcctcgaagatgacatcgaatgcagcttttgctgcagatgaagccaccactggacttataacgcttgcacaaaatgacagtagcgtcactattggatttggactatcaaagaatggaaatgaagggttgatgtcctcataatacggtggctccatataagttattaacttaagctttgatgtgacatcatgctccagtggagcattaacaaactgtaatatacactcattgggtgtgatgtcgtccccaatgtgctgagctacactttgccaatcagtaccatacttccttatagcttcgtacagcttttcaaactgttttcctgtccatggtttctgatctttgttgtttgaatctactctagacagactttctgataatctttgtggtagatcaatcctgacaaagctttccttggttagagtcatggggtagttggagttacagtagcactgtgtacaccaaatccctctccttctcacagaagggctcatttctaaaaattattttaatatttgtacaaacctcctaagtattccggtcctaaaatatagtatgaattcctgcacatgttattacatccacagcattttggatagttagccttagaatccacacttttccctgaattcaactctgctgagtatctgaccacatcttctgctgattccgggtcaaattgttcagagttagattcgttagaatcagagtagtagtgttctgcagttttcggaaggtcgttgtagtttttcctcgggttgtgaaacgagaccgacttatcatttttttcgttggcatcttcatcctgaactaatttataacactagaaactgtacactcatttttctggcataaattctttctcctgattcgtttttggcttgaaaattaatgattccccaatagtttaaaaaggaatggatcttcatcactattgaagcgtctcctcctatatgtttttaaaattttatttctttacctaatttcctaatgcattctgttactgatagatatttggtagggtcctttctgtacatattaaggattttattcctaattcttttgtagtggtcgcaaatggcgtccttgtcattcccgtagcctaaacaacgatgaatattgaagtgaattagagtaaaattcattaaaatcatcgaatacctataaaaatgttctgggcacattcttcttctatgaagttcacagcgtttatgtcaaaccactgcgtatactccggtatatcaaactcagcagcgtcatcgtgttcaaaggaggaggaagctgagttacttttggaagaatcatccctggcttttttcctcttgaatataccgcctcttttctagaaaatcaattaatttacatgagaagaataaaagttatatgtaatggtataatcaggtatgaatggaaccttgatggtctttaaaattttggaatttggtgagccagaacccggttttaatttaggcataatagtttaaatatataataaaagtaataacaaattaaaggtggataaaatgggaatcatatgttctaacacgacatgggaagggtttcaaaataatttacattcgatcctattcatagatggtttcctaaaattttaatatttttaatgtaaatcttacatccaccttcgacaaatcgtattcactgcccgtcatttctctccacctaaatatggtgttactatattttcaactaacagcttaagaacatcgttggatgcagattcgaagtgtgaggttgcatcataagactctgttacgaaaatctgaaaaattttaattatatgtgtgatggtttacgttatctttgcattcttttgatgttggtacgtatatgtctgagatgttgacgaaatggtcttcaaccttcccaatcaatcccattgcaggcattatttctacaacacctattatttaaattatactaaccagccattggatcatttgtttcaactgttgttgatatgatacacacgtactttcctttactagtgaccccgtgggaatatgaaaccagagttacatagacgtctaaaacgattataaataacagctactaagttgatttataaatacaatattaaatctttatggaatcttgaagttaatctgtgtaagtaactaatagatgacataccgtgtttacgcctaagttgtttctgaggtattataatttgacatgaggatgcgttatttgtctctggaataggattacttaatatacaaatgcatcttattactttccctgtgcttttaaccttttcgggagccagttctaggcagtatgtgggatcacacactaccattgaacatctcgcaagttctccttcagctgtcactactccacacacctttccttcttcatcaaatttgaactctttaactggtttgtttagcataaaagtccctctgtgaattgcacattttctagagaaagcctcggggatcccgccaagaccgtatactgggtaaatgaagggagatgacccaaatctcattagagattccatataaagcttcatcttttttatcggctcacaggcagggagttttaggtagtcatcgttagtgtaaagcgctactgcatgacccaaaaagtcaattgtattttcctctagtccatagtgtttgtagtatgcagttatggactcgaggaatggattgtggttcttccacgtactctggtccttttcgttaaagttaaaaacaaatttataaaagttatggcatctgtttttttcaagaaaccccatcaatggtgatgaaagcgcctctttgtcggatgccgggaccttgtggatgaacttttcgctgtacaaaaaattccccttctggtgctgatacacgtaacttccatccagaacttgccattccaggtattgagaagtttctgtggcccttagaattttaaccaatttccctcccgctagaacaaatttcggtattaggtccacattccaatctcgattaactccaaatgaagttggaggcgatgattctattttttacatgaattatataatattatacctcttttgaagtatttgtacaggttagtcaggtttaaagaagctgattctcccccgtaatatgggttacgatccattacaagtaccttctttcctacatttatattttataaaaactttgtcgtttaattaacacctaccgctctgtgaaagcaggccacttaatatactctccttcaaacctgttccaagaacacagacctaaaattgagattaatttagggataaaaattaaataattttacaaaatatattacatcgtatatttcgtccattttattctataatttacactgatatttgataattaaggaatttattactaatttttcttaaacgaatataaaatgtactaaaatatcaagaaaaagaaaatataaatattttatcttgatattacagggaattaaacaatcaattctaaaaacaaaaaataaatataaattaactaaacctaataaggctattagcctaaaaaataatagtggaatcacatatgataaaatatgtaactgggaataaattaatagactagaaggactaaaattcaaaaaaataataaaaattgataagaaaaccttgaggaatcacaagtgagtttgactaaatataaaaattaaatcgggaataggattagtattatacgaacttagggtaaaattcgaatgaaaatcactcaaaatattagataaaaaacaaagaactcgaaataatattaatttagtaaaaaatcagatttttatcaattcggttccggtagctgatattataacttcaaaagtgttttattatctatcaataatcatttaagaaattaatattttatatgtgcaagtataatagttgtaatatttaggtgacaactttaatagcttgattcttccccattatagtgaggtattattttatcagaaacttcattgttttaattactttgtttattttattttataaatttattaattttttatttcaacttcaggttagtttcttattttttctttttttaaaacaatctttatcaccataatgatactaatttattttttcccaaacttacttaatctaattattttttagataaatatggagacctctgtcgatttaaggaaatataagttgaagaaggctgatcgcgttgttccttacaggaggttgaacacctctttgaaggactgcaatccagaccttttcgttaaagcttttgctgagcatatgaaactcaagggataccttgaatgtcctaaacgtcttgattacgcaaaaactagtgttgctaaagaattagcccctcaggaccctgattggttttacattagggccgctgctgttttgcgtcatctatatttccacccagactctggagttgacaggcttagaaaggtttatagtagcaagaaaagaaacggttctgcccctaatcacacctgcagagcctctggcaagattctaaggactattgtccaacaacttgaatcgattggtttccttgaacaggaccttaagaagcatggcagacgtctttcccgcaagggttgtaacactgttaacgcctttgcccgtcaactcactagagaagtcattaaccgggcttaatctactaccataactatacatataatacacaatatacccacatacacctgataaaacacctataattatatatactcaataatagtcattatttaatgtaaaaactaaatagtgtaaaattaaaccacagatctgttcctaacaaatgtaatgaaagaatacattagagaatattttatttatttcttaagtttggagatatgtttctggaggaagaccagagcttcagattcctcaccaaaatccttgaccgcaacactcgtggcgcctacgattttgcggggcttgccctctatgtcgtacttacacaaaccagaccactgtcccaaagtcttggaatccacatcagtttcaatcagaggaattgagtgttccttgcaaagagcttgtacaagtttaacgtaagcaggctctgagcaacctttagagagaaagcatacttgggcagtcttggaatccaacgcctttgctacctcatggaggcctcttacaagcccaccatgtgatagtgaaaacaatagtactttctggatcgccgtggataaatctgtaacctgttcatcctcgtccatatagttaatgacctctggggatccgtcttcagccatttttacgaattaattactattcacaaactttttattatttttattttattttaggcaaaattaactgtaaatcattaatgatgccttgggattagtaaacatatacaaatagaattatcgttactaattatacttgctgacaggtttgaagatatatcaagtgaactatgttattgtggtgtaataattggcattaaatagtaacccacttaagtggcgccagaatagtatataataaagatatttagagagaaaatataaatataaagcactatttaatgagtggttacttttgtagagaatggggctattcacaccctctctttaacaaatagtccctcaattcccttttcgttttacaccttaataatctaagttaaaaacacatttcaaaggagattcctttatttatattctcaattagttaattccacatccacacatttattaaactaattttcacccaggattccataaataaaaatcgactaactataatgtatatttaaataattaaaaaattattgtgttttagtcatttcgtgactgaacctaggtagaaatttgaaaaagagaactcaagaaaagcaaaagtcggtgatccctgaataaccatgttactgtgacgacttgaatcccttgtgagatcattagcgaatattgtcctaaaactaactcaaaatttcaaatgctgcagttctaaattcttaaaatccttatcattgagatcatagcaaaaatcagtaattattccaacgtgttatcaaaagttcattcatcttcttgtaaccactcaataaatggtgctatggtttccttcgccctgaggaaaatgttattaaggtttccggagtgacggttactcttgttatagtatctgataaagtcagatccttccaaaatgtcatgtgagtatagaagctgtgaatagtatgggtaatttgttatttcttgtgggttcgactggaaaatgaaatattcaagtgctgttatcttttccttcggtgtcattgaatatccagttgctgcctttaccagttgaatcctatccttgaagagttcgagtgtgagaggtacgtcagagttgaaaatggctgaaagggctatgaacatgcggctgacgttgtcaaagccttgagaaatctgaagcatgtgaagttcttctgaaaagtcttcgcaagtcctatcacctttctccaagaaacagcgtaatcttgtggcaatttcagacaattccggactctctacggataagtcctcaagcttctcaaccttgtcaattttctcagatttctcagatttctcggatttttcagttttttcagacttttccaccttttcaggtttctctgacttatcggacttttcatttttttcagatttacttgggtcacggtgcttcttagacttctcagacttcacaactgtgttattggccacaccatttgttggctcctttgaactagaaccctccttcgtcatcttagctgtgttgattgggttcttgatcatataacttgcggctttgtgagtcatgtccaaagtgcccttgtgaccgcaagcgttacatgagcataggagctcaccgcgcttaacgaatagttctatttcaggcaactggcagttttgacatagcacatacaactctatgaacttgtccaacacgcctgcaagtgtagtatcagtgtgagctccgtttatcaatgctttctcttccgactcctcaaacttcgacatagcacccaattcacatccaaagaactttgttgcgtaagttggaggtcttttcagtgcgcgagctatatctcccatgttagatatgttagttttagtaccgtttccgcggccctcgatcctggattggattctgggcattttataacggtaattgggatcgtctcgatatcggggaatgttaacgtaagacattttgctaatcaatccattactcaaattcagagattaaaatgacctatgttacatgaacagttttctgcaaatgacgaccaaaggcattataaaaaaactatacaatattgtaaagtcttaatttaaaaagtattaaatgcctatcactaaaactttaaaataaccctatttacttaaaatatgtcatgccaggttaaattattaatctgcaaccatgtaaattaataatttccgtaagtgttgtgaaaatagattcgggaataatcagactgaatattggaacagaatagtctcgagttttcttcatgagaactattaaaattttaaattaaaaaatacgataattacattaataatacttattgatggaatttttattcgcatacccaataatcaccacaataagaagccaacttgctcaacccggatattacagaattcttcccgttaaatacttttccctcttgttacactatccttggataaaatttgtttgtttcttcccctgtttaactctaaacttcttgtttatttttaccttacacatgcccaccataaccttttgcattcttccataaagaattgagaatccaatccaaattttggtgtttagtatttactttttataaaattttaattttaacttagtttaatccagatttattcttaaattttaaaaatttatttttgacatcatgtaatgtgtttattaaaaatcttcctggctattctttcactttaaattgactgaaaatactatttattgtatataatttataattagtgaaaaattatttcaaatgttttgattaataagcttctattatataattgctagacaatcactcgaattaagagatttaattggttcaataccttatgtttaaccttttaccctattcaatgttattattgttgtaaaattaacgtagaatacaaacaatgtgtcaattatttacttgttatatacaatatcattacatcaatggggaaattactatagattttattcgtaatacttttgcttgtaaattatcataattcacaaaagatgtatattattctgtaaatggatgatgatgaacttatccaaacccttgagtcgcttaaccttagacctaccaaagttgaaaaaggaagatttggtgaatcttatttcacagacgaatcaactggagggaaatatataatcccatccaaaagaccagatggaacttatagaaaggagattaagataaggcctggctacgttccaccggtattttaattgttttaaaattattctttaggaggaacgtcagctttatgttccattacacagaagaacccaaaccaatcaggactgtacacctcccaataattcaaattttaatgaatcgaacaataaattgagtaataaagaagagttaaataaaactgaacctaagaaggaacacaaaacttcaagtctaggatctaaacaaactgttacatctggattaaaaaataactcaaaaccgccaaaacagtcaaaatataatagtcgcaacagaaaacctccccctaataataattcaaaccctaaagatgataaaacaacttctgaaccaaataaaaatggtgaaaataagaataaggttaccaattctggtaagaaaattataaataatgggtaatatcaggattttaatcttcatccaaatcataaatttaacagtaatatgtacccgatctatgatatccgactttcaataaattaaataaatgtaaaaataacacataaagattattattttagttgtactttactcttgttctttatttactgggtgtgttcaccttcatttttcacccttaactaatttttacctataaaaatcttgttaatatcactaccgataagttataattttagattgccacaccattttctttttggtaagtattcatattaatatgtagtgttaatataaatagttaatgttgttttttagtatttaaattttttatatacatacattatattgaaccaattggttaatttatcaaattatctcgaaaataaaattacaagatttgagggagttccttttgttgaagaaagtagtttaaatgatggacatttccataagtcactttcacctaaactgagtgactcattttttatcacatatttgataataaactatcttatacaaagtattgatcctaaatctataagaatacaatcattatttgtatatttcactctcaaaagttttacacctgttttaatttgcatcaggaggtttagtcacgacagtgaaattggtacatatgattggtatagagttggaggattaagaaaaaacgaatggataagtttagattttcagggagatcccatgaaagtcgtacaaaaaacaggaaataaaattaaaagcatacaagaaagcaggatttttggttatgatacactaaatagtccattatttgggttcacagtcctattaggattactgattggtctttgcattggagtgtttttctcaaggaaattaattaacatgttgagaagagatattaattatataaggggattatttggttagtaactattaagattttgaaaatgacaagagttataaaatctgtttattataaattcattattagaccttttgatataaggttaaatagcataaggtatgttatcgtgaatgtatagtgtttgaaattgaacatatttgttcctatctaatttagtctaattaagtatggatttacaacgatctatctagtgatatctggatgtgtatattacagattttgtttcattttatcgatttagctggaaataacaactcttatgaagttggacaaggtagtaatatcgaatcatcagtgaaggtgatattaatttaattgataatatagctatggggtccatggctgagattataattttatactaaatgtgagatatttcaactaataatgatatgagcaaatgataaatatcatggaaaacaggtatctattaaatgttcataaactagtgagctaaataacagtatatcaagttatacatcttgttaaaattgttggttaatgagtaaaatactaatgaatgtgataatatccaaaaatgatcatggtaatgataaagtatcatgacatacactactaggttgtaaattgaaacatttgattagataaatcaaagaatgtaacgagttttaatcatatcactagacccattaatgatataacggcctagcaaaatgacgtcgagtagttacaaggacgacgttgaacacagtagagccaatcggtactctagtctgtaccatgattggttcatgattggtgtaggatgttttacatactttttggttggtctatcacttactctggtttatgtactatgtgagttggattattttatgttatctggtttatttcgtattcagagattcttttcagatgatgcatattacttcagtaaacagctaacattaatgtatggtgttattggattcacccttacattacttattggaccaattggtaaagtcgcgtgtatattgtggtcttgggtactaacactgacatatcttgtgattggaacatactcgtacttgattggatttacacagtacgggaagctcttaattagatcaatgagcatcatatcactcataacacacatccttatgtgtaacttcatattcttcctatttgatccaatgcaaagtggtcataccaagactaatgaaagtgtctcatcagaccataacggcaaacactcttcagttattggtccatacggatcacttgtatactatagggtaatattgtttctcgtcggattttttctcggatcaccaattgtctcatttgtcctgaggatgagtctgtcggttactacattctctgaaaaggacccagtaatgtcttcagttgatttgtgcagaataatgatgctgatgttctcaataaccgtcacggccagtacattcctgacgctcacgttctcaaatggcctaagtccaaaaacagatcacatttggtttccattccgaatgatatcttacaggacatttaagaagacaatgtttaacttctttgacctagagttgctacttgtggtatggatcgtcaatcctctcatcatgactctaattccatacacaactaggatccacttcgagtttcacaaattctcactagttcacaggttattgttctcaatgtttatgattgggataatggtactcatgcatagagatatactctacagctgtatcagtaccattaaactaattaatgcatctatattcaacatactgtatactgatggatacacacagatatatgatgaacatcttaggaaggaaccagtatcaacaactccatattctaactacactgtgagaacttctgaaagtgattcaacacctatggtagttcctaatgagatttcaattccttcagttgtgtcatatccatatcttgagaatggctgggatgatgttgaaaatgaagataaaaaactcttattgaggtcattcagcatacttcaatcacttcaaagactaacacactacattaatactggaggtgatatgtatatccataacatcttctgtgacccagaactatcactgtgtaaaccacccatagataagtctgaagatctatcagagaccaatcctgatgacccaatgaaaaccacagtctttctactgaatgagtacagaagtgagctgttgtcaatggttggtagtacaatcaatagatacaaacttgagaagaattcttttgtatatgatattaattatttttactacttttcttccgttcaaattgatggttctgatttggaatattttaattcggttttttcaaatattaaacaatttaatgcttcaatacgacctattgcagatccaacatcagttctttccactaaaattacttattctagtccttacccggatttaattatgaacgacattgaaacatatatttctttggttcaaaaaaaattaggcttatttgatcaaatttgttctgaaatttgtaaaattgaagaaacgctaaaattcctaaaatcaacttgtatcttctttgaatccgtttttttaacagttgcattggtccattgcgctattcttggagaattttcaatttgtttatttgaagacctcattcttcaattatcaacatatataactattacagacaaatcaaatattggttgtattcttagtcacgtagaaaagatttcactttctgcactttatttaaaaatcaaaatttgtgaattatctgattcaaaagagttttataattttttaaccaaattaaatgacataaactgtagcatagaacatatattgtatctcatatgtactgttgaaacaaaattggcaaagattaaaactagtatagaaaaattattgaaacttaaatcccaattgtcattactattaaatgggatttggtcacaaaataattgtaaagttatttgttctagaattcaagaattaaatacctgttctctggattttactcatactaaaattactttgctttgtttatactcgttaatcccacaagagataaaatttttaaaatgttttgtatctgtaatagaatcttttttagaatcaacatttgattccactcggaaaattaattgctgtctaacggaaaatttggtcaagaatgagtctcaaattacattatctgaccaatcactaaggtcaaccattcttattcagtccatatctagcttgtccaaacacttaaatgaatttttatgggttttaatctcacacaagtcatttgaagaatgtaaattttttatggcgtatttgtcgaaattggccactttcacatacaaaattaaagatattcttgaaactgtgaattgttgttgtgtttgttgtcataaaactatttttaacgatatctataaagagtcacttaaagatatattaaataaccataaaaaatttaatcctcattcacaattatatatgaccaaaattattgaaaactatggaaatcacttatgtctttgcctagtcatagatcatttattactaccaactattgaaataaccacaggctactttgttgacattgtatttgattttttatataacatatgtagaatttttgataaatattcttacacaacacgtcaaattattgatatttcaaagtttatccttttattaatcgtttttatttataaaattgtaatttcaattgaaaaaagatacctatgcaaatgtgacagatcaacgtgctgtaaaggtggcaatagaaatagtttttgtacttgttgttcacctaaaaaagtccaatgctgctattgcgcagagagtaaagctgactgtaattgttgttgtaaagaaaataataaaaaatgctgtccagaacgatgttccaacggtcgtaattgtgaatgttgtaggtgttgttgtatttgtttttgcagatcatcaaatgatccaaattattattacttcgtatcactgattctttatttatcccactttttagaagaagtattcacttttgacaatgaaacaattagaatagcaacagaatatttgtcaagtttgattagcgaatttgatttgatggattataaaaaaattattaagaagttagataagataagaatcactaagttaccagaaaagataaaaatgctaatatctacttctactgatatatcaactttgatcctacaaaataacaaccatactttaattttgagcatactttcaagatatcaaagaaagctagttaacggttcaataaaaaattattatgaaacatttgcgttagtgccaaatgttgcaataattagtccaaattttactttgttttatcaagatctttcaggcttaacacattttattattaacagtaatgaattttcattaaaaacaaaaatattcgtaaaacgttcaattggtatcgtatcatcaaaatacttagaagctatacttaacagaagaaaaagcaaaacacaatgctgtcaaaacaaaaattgcaagttttgtaagataatttgtaattcagtgtgtttaatttcaggtgaaatgaatattatatcatcacaagttttaagtacattgaccctatgtattgtccaaaaatcagataaactcttaaaattaacaaagttgttgttcgaaaattttaatcaatcaattggttgtaataaagatctaataatatacaccaaaaactccagaataagcgaatctacacatggccttttgtatgaaagggacggtaactttgaccacattaatcctaagtactttggttacgatgatgtttatagacccagtccacagtttggatctggatactttaagtttgtgattagcagagtgttcactgtcattgtactggtggttctattcatattcataaggactagatttgacagatttgtcaatacagatatctttggcagatacttgatcaaggtagattccaacattggtaggcttagggaggtacttcacaacagactgagtcacagcgttaggaacattagcaggatgggaagtcttgacgatctgctaggtgacatgtcggaaggtgatgttggtcataacctagtctttcatcatccagagcggtatcaagatgtcattgataatatgggtatggctgacatgggccactatgatgctatgtctgatattgacacactgtctgatacattcacagatactagctttgatggaaccactaaggctgtccaggagtccaggagaagaaaggttggtttctacatcctcatcattgtgttctcacttctgtccgcactgtatctgaactttgtagttagagacctatctgtaatgctacagctagatcataccacctggtcttacttcattagcataacggtgttgatgggcatgatcattagtctagtggttaagtattgtgtgcacctgtatgattttgtgtatgtgctggagaactacagtaataagctgaccaagattgagagcttcgtcgatgacagttttggaggagtcactggtaacctaacttacacatctaagttcgtcctgctgttccaactgatgaggagtatgaaaactgacctggtatctctgtttagtatgaactatccatatcaaattcctgcacacagtcttatgaagaataaggtatatccttacaaggacatgactggtggcatggagagaatgatgacatgtgagaacattgagtgtattaggagaatggtcctggattctattggcacaccagaatccatggatctgcaaaatgttcttgacttcgtgtcatatgttactgtcaggaacacagctgagtttgatcagtaccgtggttactttagtggcaatgaacggtatctggcttggagacttgggaaacttctgggtcacaacttcttcctactgacctatggcagatactcatgcatgcttgagatggatcacaggattaggaaactcaggataccaagcgctcagtttcttaactgtcagttcctatggcaactatttggtaattatgaatctgacctcatatctctgaagtgtctgggtgtagattcaataggcattccactaactcatgtacagaaggatgtcctcaagaataagttcgcggatgagtaccttgatgcgttcaaaaagtaccaagatttcttgatcagaaaacttcatattaaagcctctaagtgttatgactcacccagctgttactttccatatccagaactcatcaacggtacactggacagggacaaagtaactaggctcacaagagagtactttggtgacagcagcaggagactaagcctgtcactgcctacaactaactgtgatgttaccaagaaggttgttaacggaaaaggtgctgagtcacctggtgtttcagttactcagttctgtgatcattggttatatatgagacttggttgttgtgagactgaggattgtgagaagggagtcagattcgctcacgacctgataatgtcaaaactaaacggtgactctgatgtatttgagtcaatcaaggataccgtcgctagtcttaagctgagtatcctgaatacagaagagacttatgagacaccagaggatatccacgtacccgtgaagtcttcagagcatagatcactgaaggactatacttacaaacttaatgagtttagatatcagacaacagatacctaccaggatacagttcttgattacctgaacagatacatgattgagactatgactaatagggagaaaatcatggtgccactaggaatattccttacctggtacggaattccagtatgtgaacagcatttaagaaatatgggtaaatttcaatatctgatatgagaaacagtggttaatgcagtttaagatttaagatttcagatttaaatgtttaagatttaagatttgtaaagtattttaattttcaatgtagtaaagattgacatatacattgtagcatatagtatattatagttaatgacttttgtcatttttaaaatgttattacagttgttaaaacaaaataattttatgaatttaataggttacaattgtgtactaattcagagcttgatcatctgcgattaaaaatggtttataccttttattactaccaactgaatttaacttgtttaacaagtcagaatggttaaatttactatcaagctgattaacactttcctccattttcttccgtttgagagataatcgttgatttatagtatttagttgttgtcggtttgcatttttcttagctttgaactgttcgatttgaccgtctaaactatttctttcaatggaaagcatagtcattctatccttgtaatcatttaattgtgattctaattgtttgtacctgtcctttttattatcaagatccctattcattttgttaatttcgtttttaagattatttaacttttgctctctggagtctaaatcaagtttccttttatttaatcttgtttctaatttttctaactccagttctctagctttaatccccagttctttatttctcaattgagacgttaattcactgaattcatcttctttatttttaaaatcaaaaagtggctgtttcaaatgatcaagcttcttttcagagtcgtcagaaatgtttctcagtgttgattcactaagtatattagggtaattaatagttaaatcgggttgagattgtgataaatcaaattgtctagacttggtcagtaggtctctctcaagagtgtttaatcggtttctctcaatatttaggttttgcttctcatcattaatttttgaccattcaagggaaatcaactccttctgtttcttcaaatcctcatccttgagtttcatttgatcagcgagctttgtagtgtattccacaacgtctgaagcctcttttaatttacgttccagttcaaacgacttagatctcaaggtttcctcaagattgtccctttctcttctcagatcattctccttctcagctaaccttttcttaatggattcaatttgttcgttctcttcagagattcgttggttatgatgacgtagctccgtttgaatcctttcttttgttaaagtaaattgttcttgttgggattttatattttcagtcagtctcaagattgtgttttctagcttttcaagttcttcctttttcgaggttaaagctccagtggtttcagaaaccatcatctccctacgtttcaaattctctaaaccagtttcatattcggctcttttcttcttacaatcaatttccagagactggaactcttgaatcttttgtttcaggtcatcttgagccagttcaagcttgtggtatagggtagaaatcctattctgtctatcttgtaggtatgctctatagtaatcaagttgttcttgttggaaggagtgttgattcatggcttcagctaatctgctctgcttctgctcaaaatcttcatatttgtttctaagattttgtctttcacgttgtaaaatattagttttgcgatctaaatctatctttattttattcaagtgtctttttgcgccacatttgcaatttaacctttcgtctgttaaaagggaagagatattttttggtgtgtttaacaaactttggtgttcatccttgttgttgaaaacaccgtcgtttctctgtgcgttcgaatagtctatatcagccattgaaagaatttcagaatttaattcatggtttctccaaacacattgactttatactacaactgtaaacacatacgatataacaaatcaaaacagcaaaaaattaagttaaataaatattatatatttgttagtgtaattgattgcgatttaaccaaaaataaaaacaaaaatatcaacaatgatattataaattgttactggtacaacatcattattaacacaacatttaaaattcagttttacccaaacatttcctattttttaattataaatgttatttaattttaataaaataattttttgttgtttttttattggattgtagttcaatttattttcaactcatttctccgttataccatgaatcttcaacacaatattatctttttaccctcagaacattatgtcggagcttgacatttaatgttaatttatatctatttagattcctatttaattttatttaaaataatttattcgtatatatgtgggcttagtttatccaggaaaatccctctaaatgacgtaacatgaatttaatattattaaaaatcagtttatgttgagaaacaaatataaatatcctttatgtgttagattaatttattattaatgaataaataagggagtactgtgtcagagtaattctgaaaaattccatactttaatttggtatttaatgttaattttggtataaagttctgtataatgatttaaattttagtaaacttctttttgtatagtccttatttacgtctctagctggggcaatgtactgattcgattattaattaacctgttaatgtttttatatatttgtattttcacacctaaagagtaaaatataataattttaatatgaaatataatggaagttttggtttagtgtattttttctagatttttcgtcaaaataattgttttctattttatacgtatttattattaaatttcccagtaattcatttccaacattgtaaataaataatcccctctaaattagattttttcattaattaaaaatggacgtagccaatgattacgccgaaataacccccgagattctaaagggaggtgcccaggaggatcgcggcgagactgccagaatgcagtattttatcggatctattgccgttggagacctgttaaaatctactttgggacctaaaggtatggacaagttgctccaacctatgaatcttgaaggtcccggcggtggtatgaatgtagtaactaacgacggagcgacgattttgaagtcagtttggctaaataatccagcagccagagttttagtcgatgtttcaatgcagcaagatgctcagtgtggagatggtaccactggagtggtagttttggcctcagaactccttagagccgccgaaaagctcatagaacagaagatccatccacaaacaatttgtttgggtttcagaaaggcactaaaggttgcaagagataggctagatgagataaagttttctagaatcctagataaggacaagtttgagtcagacctacttaatattgcaagaaccaccctttcatcaaaactacttcgcgttgaaaaggaccactttgcaaatttggctgttaacgcactcctgaggatgcacaggaatctggacaaggacagccaggacgcttcatcccacctaaatttatccttaatccaaattataaagaagcccggtggaactttgaaggattcatacctcgaggacggatttgtgcttgagaaaagaatcggagttggacagccaaagagaatgactgattgcaaaattttagttgcaaacacaccaatggatacagacaaagtcaagatttacggggttaaagtcaatgtcgactcatttgaggcagtaagcgctcttgaacaaagtgaacgtgacaagatgaagaaaaaggttaacaaaatactcgctcacaaatgcaatgtctttattaacaggcaattgatttacaactacccagaccaacttttcaaggaggcaggagttatggccattgaacactcagactttgacggaatggaaagacttgcagcctgcttagatgctgaaatagtttcaacctttgacactccagaaaaggttaaacttggcagatgtgaccttattgaggaggttatcattggagaggacaagctcattagattctcaggatgctcaagaggcggcgcctgtacgataattttgaggggagcttcaactcacgtactcgacgaggctgagaggtcactacacgacgctcttgcagttctaagcgagactctaaatgatggcaggatagtctgcggaggaggctgtgcagaacttgaaatggcacactacgtagaagagtacgcaaaaacaatagctggaaaggaaagcttagcagttgaggcttttgcccatgcactcagaacactccctggatacatactaagcaatggaggattcgatagcgctgatgtactctgcaagctcagagctgagcattctaagggaaacgttagtgcaggtatcgatatcgacaaaggatcagtaggggacatgatgaagttgggagtgtttgaaagctacaaatcaaaactctctcagatttgtctcgcaacagaagctgctgaatcaattgtaagagtggatgacataatcaaatgtgagccaagacaacgtaatcctggtgtataaaatccctcattttaaataatcttctttatcttaatgtagtaaactgtattatattcttcttttgtatttttattgtacaaaatattaaggttccagttagtatcccatggtcagttttagaagtcttccaacttcttatggccaagttgcttagttttccttcgagactcacgtctggccattttatacttcaaaatctgaaaaagtatgattaagataaattatacctgttcaggagtcttggtttcctcaatttgttcaagaaatgttaagtgcctggcgggagtgtattcctaaaaaacaaattaaaatataaacaaacctcagcaagttttacagcttcacgaattaacctaatacaagcctttttattatcatgttgattagaatagtctaaaaatttaatgagaatccaggaaaagaaccatcacattcaacaataaagtcacccttttgagttatcttggccttattaacgattctaaaagtatcaatgctatttaaaataaaaaaataaaagtttaaaataaattgtatgctacacatcaaaacttacagaaacttttctttcaaatcttcagtcaaccaatcagcagattgcacattgaatcgaatttgaactttagtttcagactaaacaaattaagataaaataattaataaattctatgttttaaataaataatttggaagaccaaccttatttacactctggcctccagggccggaagatcgagatgttgtaacctgtagttttttaacagggatatttacgctaaaaaatctacggagattaataaacttttggatttttttgaataacattaaaattctaaaaacgtgtccagatttacggagatattgtgataacgtcaatcgatgtggtggattcatagactatattcctaaggtgttggatttattaaacgttttttattctacaatttaatgtttcatgtgatagtatttcactaatatttaaacatataataaacatttcaagatcttatcgatattaaagtttctgaagttgttctcttcatctcttctttttagtctttttccttgttttaattctgtatacaaggaccaatataaggaataaaacaattgatactacgataatacttcttccaacgttttcaacgttgaccctgaaatagtcatttggagctagatttacactgtcgaacaaaggatgcctttccatgacgtcactaggaataactccaggagcgcttatagtctttcctccgattacatttacgactggaacatttgccagcggtggagtgttaggatcagcacttggcgatgtaccaactgataaattagttggtattgctttagtattcaatgagttatttaattcgtcaacattggtatttttatctcctgtaggaggtggcaatggaggtgcttgttgagttactgctacaggccctacaccaggaaccatttgtacttgattaggtaaatattgacctggcgccatagctccggcagctatcaatgctccttcagttcccataccacctggtgaactaactcctccctgaggttggacattttgttgtactacagcatcacctgcctgcgctgggaacaacccattaacatctattggagttggattgttgtatactgcgaatggacctgcttggacgtgtttgagatggtaccaagttctccagaacttttctttgagcatatctttaaattcagggtttaattgtaaattagaaacccctccctgatcaatccactcatttcttccttgatcaagaagagacagactcctcatatattcatttagatcatatgtttttaccaaactcccaggatccacttttaattcctgtctgggggattcgctattcagaacattagccgtagttgtggtaactttcatttcttgtaaaatttatttaatccgattttatacaatttttattgttttaatatttacacaatttgttgaatctgatttgtattttcgaaggtatgagtttgtccatatagcacgcattcgcacacatctcacttggtgtaaaacgctttaagttgttattaaatgttggaatccacatgaatatcatatgtacttatgtttccttaaaattatatgttatcctggatacttcctgaataaatgtgtgaccaccaatactattgaattatcatcaattagacaaaaactaatattccacaatattatatgtaatttagttaataacgttagaaattaaaaatattattaaattaaaagtttaaaatttagagtaatcttgaagctttacgaatagggttgatagagctcttctagaagccatacaaacatcatctagtttagatttgaccatgctaagagaatcagaattcaacaatgagtatgcatggttatcaagtgctttcaatacattaaattttggaacaagaagtaaaacagggaagagagtataaacaaatgaccagaatgctggagaaaccttcccaaagacggcatttagaactggagctacaacctgatttgaaactaaccaaaaaaacaacactcttagaaagtaatcagcaagttgtgagtctttgtcggtgcagcaatacagtccagctcccaccggtaagaggaatccaaaaaagaaccctccgaaaccataaaaaactcccatgaatattgaaaatataaaggaaaggaaggttaaaaaataacgaaatttaagaagattatattatatgtggtatatttactattggatacgggttaaacacaattgattaaatttacaaatcttattatacaactatttttgagcatttctttaacatattaagaaaatttgcttgacaatattaatatacaattttaaacattttaagcatttcctaaaacaacatttctgaacgattgctttcttacttgtttatcttccatttttaaattagtattgaatcaatatttcatctcatcataggacgtcccataccacccattggtcccattcccctcataccgcccattggtcccattcccctcatagcagccgccggaggcaatggaggcaatccaggcattccacccatccctggcatcggtcccatagctcccatacccattccaccagagcctattccacccattacacccatcaatgctcccattccagcgcttgcaagcgcatgtgaaagtcctggagcgattccagtactacctacttgaagatttgacgggcctacagatcccaaaccatcatcatcatctaagcttttacttcccctactttttaatttttgattgagttcagaagtttgctgtagataacttgtgtcaattcctagtttttcttgtctacgctgccctaacttatttcctactctcatttcttacaaaatttatttagtccgattttatataatttttattgttttaatatttacacaatttgttgaatctgatttgtattttcaaaggtatgagtttgtccatatagcacacattcgcacagaatttaggttcatgtaaaactgttgaatattctatcaaatgctggaatccacatagccatcgtatgtacttatgtttccttaaaattatatgttattctattcatttcctgaataaatgtgtagccaccaatatcacaaatagttactgattagacaaaagatgaaattccataatattatgtgtaattcaagtattaatattagaaattaaaaatattttacaaattggttctagtgtcatttaaatttaactccttttgttagcctgattggcttagggacattcgcctcaatgtcagaatcatcttccgattcggactctgaatcggaatcttcttcatttatctgatccaaaccctctccagatagccattttttccaattcattagctaaaaatatgttataaagagttatggaatattggtgtaacgcctgcctttattaatactgggatttgctcaatattaaccataaagggcgtgttagtattccccaagcttaatcattgaaacggacaatgattgttaaactcagggggatttgaatatataaatcatacctgtaacaataatgatactcgatcaggaatctcgtcaacgtcattttcaaaccattgcaaaaattcatctctacttacaattcccaacaaatacaaagaatcaaacaatgcttcaactaaatatactgattccgacagcggagggtacccccaatctgtttacatcattaatattagatatattttcaatatataaatataaatataattcttacgatgtgttgatttcacaagttcagttaataatcttttcgtatcttgatcttgggttgtatataaaagccatttctttactctttcaaatttattctggacttcttccagggttttgcagttttcgcagtttttcgcaactataacacatgttaccaatgatgggactaaagactcggtttcttcatattcaggaaactcttcatcctcatcttcatttgaatctaataatgataaaacatactcctctattaatgtcacagtttcaggactacatttgaacaacttattatgtttagctacttcatttctcttggattgtaaaatttggttatcttgtaattccttctttgccttatcggcatctgacacttcctttttagacttttcagtttctgatgtaattccagctgccttcatgaatatatcctccactgtatcttctttcttaagacttcttcgatatgatggcacaaacaaaccttttttctgaccatcaccaaaagttctatcttctgaaggaggactttccgtagtaaaagcaggttttctaatcctatcatcatcacttggtctgtaatttctgggtttctctgaaaactcccaatcatctcttgatctatccggcttaggaggtgttctggcatttctgcgatcataatcaaaccttgaaaagccatcataatccctaaaattcgaactcctcattggagattgatctatataaatttagttaattttaatagttgtggattatattaaaagtagttattacctctaggttcatccaaacaactgaatcggtcattttttataggactaggctcccctgaaaaattatttaaatattaatttcttacttttaaattttggaacatatagcctcttctggtcatcacttctttccctagataattcaaaatctttggtttgtcttccgcgactaaacatgtttctaaagtcatcagaaatggtctttgtatcttccgttcctcctacatttctccaacactctggcgattcatgagtgtttggaggttctttggacctccagttatcttcaggtgttaaaatctcgtttggaggggtatacgtagctgtaggcttgctttcgacattcggttttgcaatttgtctgatatttgtgaaatctacttcagacgccgattttctttctactccgagtaactcaaagtcgtcgtcgttatcttcattttcccaacgattactggatagtttatactcaaatgttttagtcgcaccaaacttgctaggtttttcagagctgaaattaggaagatcgtcttcctctttattcataactctttgcaagtcacgtaaattcactgatatgtgttttctgcttcccatattgaaaatacatatggtagtggatctgagaataaaaaaataatgtagatgtttggattatagggattcagtaccaacgtaacatttataaaattaatgtattgctcattttaaataatttaaaaacgatttaagtaataggaaagatcacgaaagttagaaaaaatagccaccccacggaatcacaaagaaaaaagaatatataaattaattaatttaaaaatatcttggaaaccctttaaatttacagttaatattatatgtttcaagaatttgtactcagagaaacacacatctattcatttaaccaatataggacataataattttatataataaattaaaatctaaatattatggaaagatagacaacttttaaagaacaataattaaattttcgattgttttatatatttttgaatctaacatttggacatgtgttgatagatctaattaatttattaattatgaatctttaattcatcagtttatatttgtttcacgacaacatttattagtttattgtagttcacactacacatgtttgtttaaaccattcttccaccatagattcaaacgttccatttcaaatttactaaattttatattctcaatatatatcacatctaactgaaagatacgagccttcttgacattttttgttcaccacaatgttgttgtaatttctactctattctggcaggttatttcctatctcatagtgcatgtgtagtgcaacagtaaacaatcatttaatgtgtaaaaagtttgtgggctgaattaaaggaagattcaattttttcgaagtacatatattgtaatttagtataatacagttgtcaaaacctttgcttcataattgtaatttattactctttctaattctgctcaccttttgtttattttttatgtttctgtaaattaaaatgatgtcttgtttctagtgttaattttttattaatataaaaagatccttaacctctaagaagaattgtatatgtgtaacataataatttttgggatttaataactatagttctagcagtaaattcaaactcccccttttagacaataaattttgccttctccacaaaatttctgaataattgtttactctaaattgtaaagtatttgtttttcttacaacgctgtctaactaggattttcagacacttgtcttaatgatattctagatcgtctatgtgtaagcattttgataagttttgctaatccatttcttttcttccctataacgcagttctttaatatataaactcttcagactgaaggtatcttgattagcatgtcttgatacacgataaagcatccaagtaagatgcctgtaaattatctaatttaactctctgaaattttaaaaacttaacaacatatgtaatagtttctctaaatctggtaataaaacataactgagcattttttgtaatttttgtgattatgtgtaaattagaaaatggatgggattaacaaagttaatcctctggaagctaacgaccagacaaaaaaattggtgttgtatgttaaccctcgacaatacgatagaatacttaaaaggagattagaaagagatcgattgatggagcgtagaggtaagcctaagactacctacgtaccaattgcagtacgtgatctctcaatgaacttttttaaaaaggacaattttgctccaaattttgataaaaacaccttcttaaataacaatttaaacaatatgaggggcaatccgaggaatatgtacccaattaataccaaaataaataattcactaacgagtccacaaatacatggatccatgtataataacagtaatttttacaacgggtacttagaaaatttcaacaatggtttgaagctggatcctctcttatacagtaaaagcttagcgatgcagaacgatgccctgtccacaaacaaactgataaaatttaattcacaacacgcaacgcctaatactctttataacttaccatacgctaataatttcaagtattataatggcaaagatcaaaatatggattctatgaataaatttgatccattttctccaaatttggaaaattgtacggcgtacgaaacgcttttattaaattcatctctctctccggcacccaccactattccaaagatgtataatcaacatttcaattgtaatgggctttacaatacaaataatatcgggaaaacagttaataacaaactcccagttctctcaagtaacaaaacctctttaaaaactaatggcaaaaaaacatctgacaaagacaagaaaacgccaccgattttaagcagcagagaggagataaagaacaattacctgctcacgaacggttctcccttctcggaatgttccatagattcagacgttgttgttaaacaagaaccaatctataacatcaatgagtatggaatattggtggataccaacccagatgtaatcagtggtctaaaaaatccatgctcaattgatataaacatggataatatcgacgctagcattattgaaagaacgcccgattttaattatatgaacgaggaagattttctgggttcatgttacgacggttcctgcgggaaaacaagcttcaattttctgttttttggagaagaacatgatagggattcttcagcgcttgaagataaggatttaatttttgaaaatattaacagtacatcaagtagcaatgcacaaagcattaaagttctgggtacagaataaatggcacattcgtcgttaaaagattcggttggttgtaaaagacttagttgatgttaaaagcttaggtttattaattgaaaacaatgattgagtctcaggtgactctttggacttattacacccctaattaattgtttaaaacccctcgaaccaatgctgtaatctgttttattaaagtttatttatttatataatatgaaaatctatggaatccagttcagtggagaatatattaataaataattgtgattaaatatagtagaaataaaattttaggattttagatgagggaaacatgtgtagatgaataaaaagatcaaaagagtaaaattagtaaaaataacattagaactggatggtattcataaaataattgcttaaacttattaaaaattgtattgaatcagcaaataattggtaaataatagctatgtatggggaattgaatgtaaggtcatttgaacagatgagaccaaaattacatattttgtatagaatttactcccacgtgaattataggtagttattaaatggcactcaagtcatttgcaaaagttttgggggttggttcagctgccttagccggatcttacatctttgtaaaaagggaacatgagaagtgttcaatacccaaaaacaccaaatacagtgttccagaaaaattaagtacaagaaatgaaatgctcaataaactaaaaactgaaaagtttgacgttttaattatcggaggagggtgtacaggtaaagatcatcacaattagatatataaatcagaaaatttttaatatctacgactacaaaatataataaatttacaggtacttcagttgctctggatttggcaaccagaggcttaaactgtgccctggttgaagccaacgactttgcttccggtacatcatccaagagcacaaaactacttcatggaggaattcgatacctagaaaacgcaatttataagttggatttcagagagcttagatttgtttggaaagcgctggaagaaagagcacacctcataggctctcttccatatgctaattatcccatcccaattgttatgccaatttatcaatactggcaactgccctatttctgggttaatattaaaatctatgaactgttggctagattcttctgttgcaatgaaacaagttagttttaaaactaaaataattttttatttaattatttaataattattaataaaattttagagattccaagctcattttatagtgacaaatctaacgccttgtttaattttccaggattgagaactaatggactgctaggagcggttgtgtactacgatggacaacacaacgactctagaactaacttgatgatggccctcacaagcacagtcaacaactatgttccaggccagaagggttcaacagtttgcaactacgttaaagttaacaagattctaagagatccagccaccaattctgtaaacggagctgtagttgaagatgttctgacaggggaggagttcacaattaacagtaaggttgttgtcaactgtacagggccattcgccggagaaaccaagcggttgaatgatccaggatctgatttatcaattttacacagcagaggaacccacttaacattaccaagaaaatactgtccaactccctatggtctaattatccccaaaacaacagacgggagagttttgtttgtactcccatggcttaatgagactataataggaaccacagacaacaaggatgacctagcctgtaacccgaaaccaacaaaagaagatgtggagttcataacaaaagatgcttcaatttacatgaattgtccagatgaacaactaaagtaagtgttttattcaattaaacaacatctacttatttactatgttaatgttaataaatttctataattttctataggtctgaaatcaagtccctctggtcaggattgaggcctttgatcaagggagtagatgaagtaaaccaaactggaaaactgtctagaggacatatcattgaagtggataaaacaggtatggttaatgtgtatggaggaaagtggactatctgccgcctaatggcacaggactgcgttgacgaattgctcaaattctacaaagatctgaagcaaagctataaatgccgtacaagaaacttagtactattaggtttgtaaagttacaaatattctagttaatagtagaaattattcaaaattgattttttgttaatatttcataggtacacatgataaggacgggaagtttaactttgatgaaatcagaccaagatttaacctcctatcctacaaattgattagagattatggagttgaccaggatactgcaaaccacctggtggaaagttacggatacaaatcagaggacgtttgcaaggttgcaaaggagaataatctgttaaccaagatccatgaaaactaccccttcttactcggagaagtggtttatggaatcagaaatgaactggcatgtactccagtagatgtattggcaaggagaacaagactggcatttttagacgcaaaagcagctcttcagagtttggacaaggtggttagcgtaatggagaaggagctgaactggaatccaaagactaaaaaaacactatatcttgaggcgcaagattacttccaacaaatgtcgcacgtcccataatgtgtaaataatactaaattatccataaacaataaaattaaatgaaagacaacctttgtacacaccagggatataaattttaaggatagaaatcttatccattagacaatgtagctactgtaaacacgacagtaaagttaaaaaccagccaatactgaatgtcagcaatagttaataatgtaatcataatttaatatatatttatatatagtagcataaatcttataaaattcacaaactttataaactattgtgtgtatgttaataaaattaaaatggttaaaagattaaaatgttatagaaggtcacccctgggtttcacccagttaattttatgttcaggagcctcgtggtaaaaaagtctcatgtcgagacgatactgcttgtgcatatcagcccacaggtaagcaaagtaaacgccgataagcattccgagaagatactctcgaagtccagcacttatgttatactctgcagcgactttctggcggtaactcagccaggcagactcccaggaaacttcaggctccttagcctgctcctcagggctacggtacggcttgggaattaatttgcgataaatcttcaaaggctttgcaaatttgtaaaacatctcctcatagtcctggtttgtaaacaggcccatgatgagtttatccatgtatggcttcaaagaaggtgtgtcatcgccaagtttcttcaaaaatggataaaactgaggtggaagcctgaaagtgtgtagtatcttggttgaaacttcaggagggaaagtggccagacagccgtagccatccctgggaattacagtctggtcctgggatagataactctgccacattggctgagtggtatttgtagcaatcataattggccagccagtatgtcctttttctttcttcagggacctataactcttatcttcccagggatttgttgaagattcgtatccgtaaacaccaacatccttatcagtactcttgtgtcgaattgaaagtgtgtttttacataaattcaaattattacaaaaattaacaggtccacagaatggattaatagaaaagggtctagaaatacacctcccgaattgtatcatcattttgaaataataaagtaataatttattaataagtgaaattaaaatataaataagtaaataaaagaatgtttacagtaatgaaatggcaaaaataaaataaaattatgtataatgactatttatagtaacaattgtatggtgtaggttcattatattttttgtaaaaatgactgcaccgagcaaatcttttagagatgtaaaaagtgttattaatttaaacaaacatttaaacaaagaagtttatgttaaatttagtggaggtcgagaaggtaagtaaagctcctttattctgtcattttagcttatatttcttataatattgacaatttataattattatattccattaacttataaatttagtcaaaggagttcttaggggtcacgacgccatgtccaacttggtgttggatgatacagtggaatatctgaagggtatttatttaaaaatattcactccatatataatatttagattcttctgattcaagtaaattgactggagaaaaaagaaatctcggacttctagtagctagaggaacttcagtgagtttatacttaaattatattttttctatccattttccaacttttttacatattatttagttgaaactcacataatgtgtactgtttaaataactatgattaaaatttaactgagtaggtgactgttgtatatcccgttgagggaactgaaaagatcgataacccattcctggaatccaacgactagtattttccttcgcacctgtgtaaccttagagatttcttccatttgaaggatttaccacaatcatcgcatttaaaaacaaccctgtgttcgtgaatacttttagtgtgcatgtttaaattgctcctctaaatatatttgttacttatataaaaccgactgttgtatatatctttctgcagccttcatgaggacaaatgaagaaggtcttgccatttattatttttatgtcttttggctctaccttttcagtaaaagtgtggaatttctgaagaattaaatttaatttgttgtaaacctcaacgtgagtaaggagtcttttcttcttatcaaaagtctagaacattataaatttcaagtaatcttactttatcgcagatttcgcaagagtaaacctttgatttgttcttcagttcgaccttcatttcaggatctggaacaaatgattgagaaattataatacctaggtgaatttttatatgtttttgaatcccggaatatgaagaaaacttcatttcacactgttcaaaaggacaaaccaagtgaggagagccgttaagttgtgtttttggaactgcaaagcccataataatcatcgtatctgaacagaaataatttcagataaagcaaccttcatctagcttcttcatatgaagttcctggtgtatttgaagctttgaagagttagagaatattttcttgcagccatcaaacccacaaactaacctctcaaactttttgttatgcctgtgatagtgtcgttgaaggtgatcagatcttgtaaaaaaggcattgcattcctcacatttgtattttttctacataaaattatagaatttcagtgaataacaatatagagttaagattttgattgaactaacctcgtttgagtgggttaagagcctgtgccttcgcatattgctcgagtcgttgaagaccaacgagcacatatcacactcatagaaggccatgagaataaaaatctcggaaacatttataaaagactaatttacaacatttgaaaatatattctgaaataatattgtaattctccaaaacatggtgatgatcacctcctttaaatgtagtagttacaatttattaaattcaggtataatatgtattttaaattatatatatgtaaaataaatttaattcgtctggtaaaatgttaaataaatggaaattgatcatctgttatgcataaatgggcataaagaaagaatctggtcagtttcttggagcccatcagaggatatatttgctacttccagctcagattgtaaggttaaaatatggagattttataaaagtgaaaataaaagcagaataaatagatgtatattaaattatcccggatgtggcagtgaatacaactacgaactcgaagtattttataattattttaaaaatatattataatttagtttcaaatcacaaatttctttaaaaaaactgttagaagtgtaaagtttagcagagatgggaactatttaatatgtgcatcatttgatggcacatcatctatttggtcaaaaaaaatcccagacggaaatgttccaagtaaatctaaaaatactgaatggaaatgcttggtcacactagaagggcatgagaatgaggtattttttaatttcacagttttaaaacaaataggtcaaatgtgcatcctttgactcaagtggaaattacgtagccacttgtggaagagataagactatttggatttatgaaaaatcgcaccaaaacacaccaaatgattgtgaagatttaaataaactaaatttgacaggaaacctggattatttctgttcagctatcttgacgggacacactcacggtaacttattaatttttattctttatcagacgtaaaatatgtatgctggaacccagtggcgctgattttggccagtgcttcatatgattcatctattaaaatctggactatcgcaagcgcggattggtattaataatttatttatttaatatcttaggtcatgtattcaaacactaaacctacacacaaatacagtatggtgcttatctttcaattctaatggcacaaaattggcctcctgttcgtctgataaatcactatttgtttataaaagtatttccttagaaaaaaaacatttaactaggtaaaattattgaatgcttttcacaattcgggaaaatcgcaaaaccaccactcaacagattcacgatttttaatacttgtttcccagtcccatgtatcagcaaagaacacgaagatactagttatgggcctttatttgcaggtgttttaatttattttaagtggttttagatgactgggaagtttgcagagcgtatgaggagttacactcgagaccaatttacaccgttgattttggagattacatcgtaaccgtatgtttttattatttataagtttcacagggtggaggagataacaaaatcaagataattgatcttgaagataatttttcaaatattcatgaggttagagagtttattaataccatattttagatattggcccacacatcggatgtaaatgcagtttcatggaagcgcaacgataatagtaaaatattagtgtcagttggagatgacgagtatataagaatttggaaacttggttgatgtttacctacttgttttcgtcactaaaaattttgtaaattttataaatttgcttccaaaaactaaattatattcatgttttaagattttgatagcttgtggcagaattttcccaaacttctaatacacctatgtcaaccaggattcttacaccctgatggggatacgttcttgagtattgacagtagttatcatttgttttgatctaatttttttaaatagggtaatgagttcattattgaacagaattttgtttcccggaattgttccatttatccaatcaaaggttctatcacttcctctcccggagaaagttaaaacaatattaggtaagtttcaagactaataatagcaaacataaccattaaatactaccataaatatataatatttttaatcgtaatttaatattttatcatcttttactcccatataataattacgtagctcatccggccggaccctttacaatacacttttatgctccagcctttaaatggtcaatttccttagcaaacctatcagatataaataggcctacacatttaatttctcttcctcaacaactaggtaaggaatatgtgtataattaattaatcttgaaattcagccgttaccgcaaccgggttaatatggtcaagatacagttatgttataattcctagaaactacaatttattatcaggtaattgttttttattactctcatattttcacattctagcacatatctcaaattccttcacatctctaattttttaaattatatcaatctaactcttgcttagttaactttgcaatggctctaactggcctctaccagatttccagaattattcgagataaacaacttgctccccagaagaattaaaattttttaatttcatatttaattaatatatgtttttgtaaattctttatccttcttgtatatttactagatgtttaataagtttttaacaaattatatttaagtgatggacttctcagattcactttccagttctaaagatgataaagaaaaagcagaggtaatcattaaccaattaatttaaaaaatattaaaacttaattaaatattgtttaggcctttttagcactgcagaaggcagttcaatcgcaaaaaatgacactaaaaatgttaggagtttgttttaataagtgcgtacaaacgccaggagaatctttatcaacctctcagcaatcctgtatttggaactgtgcccaaagaaatatcgagacccagtactttattttgaaaagattggaaggaatggtaaaaaattttgaacaaaagtaaacgcagtaatataagttttttaatttcatgagttatcatcacacttctattattccttatattttttatattcacactaattttgtacaataaaatgttttctattttaataattgatttataaattattttttatttttctttattttcatttttaaattaacaatttttatgttttaaaatgttgagtttcaaatgtatttttacctgtataaatatggtttctttctattttttattactaaattaatgatacatttaagaaggaatgattttcctaactatctctgttattcaataagtataacacaaaatacacatggattccttgataataaatataatagattgtattttttaaaaaatggatttaaattaggcagtaaattcaaatctaatggaccctgtgtggtcaccccttacacatttatcgcaccaactcaattaattcagccttctaagagaaatgtatggcctcattcagcaaaaaggttcacttttgatgaaagggccgcaaggagagccagacatcgaatgattgtcaatcaaaatatcgcaaaaaagaaaatggcaaaaagaacaatgaggaaaatggtcgaagcagtaactaaagaaacaagtgaagatcacagaaatttggcgattcagaagttcattggagatttacagtatgtatctagaaggaaaaagcttccaactcctccaggtatatactctccatcctacgacgccttgctttacctaaaggggattcccttcaaggcaacagaaaaggatgtgttcgactggttaaagaactatgatattgtctcagtaatattcattaaaaatgaaaacgggttctttacaggagatgcgtatgtgaggtgtgtaaacatacaggttcgagataaagtggcaaaggagatggaaaataaaagaataggagccagatatattcaagttttcagagttagtgagaatgcatatctggagtactatcactcagggtaccgaaaggaaccaaaggataggaactttatagacccatcactgttggtgataacggaaaaccaatacaataaattacttggtccagaagatacagatacctgtaaaacagaagatctcatctctataggcaaatcatttgtaaataaccttaaaaatgaagttgacgtaaagaatttaaaaacaggaattaggctagttggaacagtgactgaggtctacagaaatggagtaatgttagactgtaacatatttgaaacaagaaatggagtcaaggaaaaggttttttgtgtactaaaaaagaatagaatggccaaaaatatcggattaccaaaccaacagtacgagtggctgaggatgaaagatctagtactgtacccaggtatcaaattaaatttgtatgtggagaaaataagagcaactacctccaacaatacatttgataaggatttgtggactgaacattttgatgaatcactaataaatacctattttaatacagataccgccaacaacattactcctacagaatctactaccatgaattccacttcagaaaatacccaggaagctgttaccgttaaaccaacttttagtgattcaaaggaacaaagtaaagataaaagagcacttgtatatttaacaatggactcaagtgtaagtgaagataaggtgttatggtgggaaaagaaaatcttaaattcagtatctaagacttatgagaaggttgactttaatagcccagtggttaagagttatgtagattataatgctaataaggaaaaggtattggctaagaaggtcaaagtaaataatatatatgagggcaagtctacagtgcatggaaacatacctgatcaattcactctagatacatcaaaatctctgaatagcgaaaagttaaatatttcttatgaaactgatgatcataataataaagtcgatgaaacactagtcaattctgtggaggaaaaggttagtaacagaggaatcccagatgatgtaccaattggtaatttgatatttggaaattcagaaactgaattaaatgaaggagatcgtaatgtatttgtattaggaacagaagaagatcaaaaggctgctgagcttgaatacatagataaaaactataaaaaactggccgataaattctttaaaaacacaataaaggaaaaggatattcaattacacgattttgaaccagaaagtgaactagatactgatgatgagtcatatctaagtggctcagagatgatggatcctgatgatagagctgcagattttaattggatcatggaaaatgataacagaaaggatttggaaaagttcccaaggttaacgttgtatgatggagcaattaaagtgccaccaaatggcttgatacttagagtttctgaggttccaaagttgtcaaatgaacaaataaaggatgttctggaactattaggaaaagaaacattggcttcatatgaagaaaacagggaaagattgattgaggtgattaaaaacgagggactcccgacagatttgttgcctcaaactcttatacaaaagggactttatagagttaaacagtcgaaagagtacatgaagaaaatagttaacataactaaagaactaactggaaggaagtttagcaggcaagatctagatgaagcatctactgaagagttgcaaatgctagtggaagaggcactttataaattcctgaactggaacccaccgtttgatattaaaaaactatttataagtaactaccataatgtcctagatgaaacaataacgttgcctaacattagtgaagtagtaccaaatcctggattcatgaaatcaagtgatactgatagcaatactggaactgatactaatactaatactgatttacaagttcaggaacctttagttgatcaaaacgatgaaaatacaaaaagaattgaaaaattgtggaacgatatgaagtggatgattgtaatctacatctacggagaccagagtgatctgaaggaaatagtaaagcagttggaaaaggacaaaaccattcaacaagagcagaatcttacacatactccaatggacgttgaatctctactatttcggtcaaatgaaaagtgagaatctgtacacaaggttaacagcttataaaaagttaatttatttttaaacacattcatacatgaattaggcagttacacatctcaagtaattatactaaatcttctagatttcaaaaccattaaattgtaaataaaatgcataaaactttaacataatttaaaatattcttgaaaataaggctgagaatataataaaacgaatatgtgaatttgttttatgtggcaataatgaggtaaaacgagatagtaaagtaataaaatttattaataaaaaattaaattttatatattttttcttccttggattttaatggtacagatacttgaaaaaatgtaaattttcttcacttcgtttaactccccatataaaataaacaaatgttaaggaattagaaagaataacgcccagtatacctaattttgtccagtctacaaatgcaatataaaaatataaacagtagactcgaaaataatgggaagacaatgtttacactagacgtcactacggacgtcgaggaatataaatttgaaatactaagacagtcccctcatggaattccaacatacacatacttaccctgtaagaactacaaaatagcaagtgtggtcgaaaaatctattcccatatggagtccagcagccgtaggagaagtatgtacgaaagttacagtatgtacaagagatgggcctatcttagttcacataataaaagtctcgccggaagggaaagaagcgtcaatatattatgtaaagcagacgaaatcctggagagaagtcacattgaacacgttttattcgctttttaaccatttggccctgaacaagtctgtgttggagtatgttacactcaatatcggttcagtgatagatagaacacatttctcactaaactcaacaccagacaaaccatttaaaattattgtaccatatccgggttatgtactgagtagagtgtttgatggaattaacacaatctggaagagcagattctgtgatgaccactgtacatatgttaatattttttacaataataaaaagccattattgatacacctggcaatttctaaaagacgttcagaggaaagattatttttcaaaaaggttttaatgtcatggaaacaaataggtaaagatgaatatatagagtccttgaatgaagtgggatttgatttgacagtatttaataatcatataacatttgatttttcggatccagacaggtataaatttgtggtacaaagaacatttaacatggatataacctcagaaatcttctcgccgctgccaggatatagtgtaaagagagtagttgataacgaaaaaataatatgggaaagtaactcaacagaccagtgtatattcgcaagattttattcaagaaacaaaatccctttactatgtcatttattggtaactgactcaaaagaaaacaaaattctgtattttatgaactgtgcagaaaagtggtcattgattgataaaagaacgtacaactatgtgttaacgaataaagatgacccaatatacacacatagaggaattagagtagacaataaaggtgatcgtaagctgttgatgagccactttaggaataaacaaggactgctgattagaacatactgctgcaaagtggataaccccaaagggaacataatattaatccatggatcgtgtggccattttaagtcacagttctgtagctatgatatggactggcacttcgaacgctttgggtacccaatactcccatacatgaaggattttacaaacattaagatggattctttttataaggatctgaatttcgatagtaagacatgtgaagtctacaaagatgtgtttggatggtcgaagttggacggagtggatgcatttgaaatttcaccaagatttcaatattcaggaacctttttagaatcattgaataacatgggatataacgtttacggaatggactcacagtcacatggactatcggaatcagtaccagactctaaattctatataaatgaatttaaggactatgttaacgatgttttacagtttgtagatatagtgaaaagaggaaactttgagagcacaaaggaagtgtggaatgaagattttgtatacagcgtgagttcagataacgtggacctgaagtgttacttatcaggtttctcactaggaggaaatatcgccatactggcagtacaagaattccataaaaacgctaagccaggagtgagatttgtagatgggttgtttatattgtcgggaatgctgaacatagataataatctcgatacatttgcaaagaaattcacaatagcattgataaaattcacgtccttaatgacaccgaggacacaacagaacccattggaaaatagcttcctattctcagattcatttgaaatgttctcaagatataaggtgagatataataaatattaataatttaataaaaataatttgatatttatttttaaatttttgtaggatcctacattttataatgatcgcttgttctacaaaacagtggagttactctttggagcctgcaaagatatcttaaagaatatgaagtatttcccagataaactgtcaacactgtttatacacgtctcagacgatccaatgtgcgatgtcaatgtaagttaaatttattcatgatggtgaaactaatgttggtttaggggcagagaaatgtagtgtacaactacctcaaggataaaagtgatgtcaaacttgttgaattaaaaggaaatacacatcatctggtcctacctcacatcttcccaaatgtaatgccgatcataaatgactggtttctgtcacattctagcaaatcctccttcaaatttaatccatgagtgattttaaaacctgacattgttgccttgtggcatcatttaatattttgtattctaaaattttgcggtatttttatctagatttaataaaatttatatataattgacagttttttcgcaacaacctaagccttacattcataatttaaatcaatgaaggtgatttttgagtcttgaacaatatttttttaaattaatatatagtgaagataattgatattacacatctaaaaattaaagaagtcagatcaaaaactccaggatcaaattattgtttgatctagaaattaaagtaacaacacaaaaatatattggatcagaatagataaattaaaaattaaaaacgaataggacaatttcaatggttagatctcttaattttcgttagctttataaaaaataattttggtatgtgttactccgcttacatgaacagtaggggatctacaaagtgatcttgtttaaggtttaattaaattttgtagaataaaatttcaagtgtattttttaaaaaattatataaattggctgaaaattttaagattataagcaaaaatgacaagtacacaaagtgggaacacagattcacctagtcgtcaatctagggttattctgatacttgcaatcgttttagcaggtctagctactctacaggtaaagagattagtggttacatgtggaacgtatgcagtaaaaagatttaaaattgataagggtctgacagcattattcattaaactgacatcgatagcagtggaaaatttttttatattaggtataatattctctgcaatttatctcattgtaagtactagtaagagatgggatgctaatttatcaatagtggtgtgctggttaaacctaatagcatttgttataatttgcatagcatactttggatcaggagaagatgcgtccctaaatttttattattggagcttgaatcttgctgcattcacctctggaatgttcttcgaacttgtatttgatattgtaactaaggatcttatattttatttaattggaatgccaatgtcagaagcgggtgttttgattttccacgtggcttttgaatatttatacgatttgtttttcgatgaacaaattgagtatttccttgttatgaatcaaataatagccgccattggactgtggctgtttgcaggactgttttggacactagcatttcgtaattatgacgagaactcgaaaagacatgtaattcataatacggatatcttaatggaagatggtaatttaacagttaaaaataataggaatgaggaaaagaaagaaatgtcagtgttggaaagacttgcaaaggcaagttcccctattatgttgtgtattatttcatgctttttcgtatacttcctccatccagggataattcctttcgattttgtggacactgatgaaggatatttaatcatattaataggagttggagtttcagcaatcctaactatagttgtaattattttagtgattaagaaaattggtccaaatcaggattggaggaaaaaactgtatgcctacaacttactttggttctttccattggtttacacagcgattgcagttgtaactttctatacgattcattactttgaaagcgatttctccagatttgtagcgggtaacgtattagttgtaggttttatgtcagcctttctaaaatccacaggagatttcactgaaatggtaaccttatcagcaatgagtatgcaaagagatgatggtgaagaagacggcaaattagctgcaggaatcaacgcacttttaagactgttaataggaattagtatgtttttgggactgggttatgagagcgcaatatctatatgtactaaaaacagacttgactggccaactgaaggacgttcattgatatgggcattctttttctgggttgggaaatcattccaaatgggatatcatatgatatacaacacactcatacctgaccttgaatatgtatttactattgttacaccagaagatattgctcaatgaattgttattatctgatggaagattttttgttttgtggtctatcaattttgttgaataacccattttatctaatagaatcgatgttttaattaaagaaaagctataaaaaaatcaaatgtgtaaaaccattttgaatattttgaattatatatttacgtagtttagattcattcacccaatagcattaattaatcaacattttttttaaattacatttattatttattattatatttattttttaaaaactaattacgtttgtacagtataatggtggttgttaaatctccattttccctgttttttaaacaactgtcccacacaattaaacatactcatcgaccatgggcggctgcggctgtaggctcctcactttttttattcaacatggctgggtactttattttcaataaatcttcggataaaaagaagcgcgagcaacttgataaatgaaaagtcatgggtttcaactatcgcacaaaattttaaaacgtgaaaaaacagattttaaaagtttgataacacataaaatattaatttaatttaaattaatttacaaggtacttaaaactcttagtttagcctgtttagtcactcgcatcctcatgagccttctttccctcttcctcttattcatcttcacgttctttagataatttattctcacgttagactttacacttatccagccactttgtgggtccagtttgtaagatttccctaaaatatctgttcacattgagaaaatacctctgtaatgaaaaacatctcttttaagcccccagggtaatgaccaagatatatgactaccatccctagggatagtgtcatctatatccctataaccctggttgaaattatgagttttatgagtatctttaaagatgtcttcttgttgacctagtacttttataaattgtaagtttgttgatgagggttcatgtgtttgaggttcgagttccaaatcctctaaatttgattcaccggaatgctgaagctctaaaatcttatcataaatctttggcctgtttgggtcttccttgttatcggatattaaaatattttcgtcaagtaacttctcaaatgatagaatctcgtcacttaacttgtaatccatagtgccatacgcatgaattttatcaaacttttgagtgtttggtacatgtccatagtttaaaagacttaaatacatgaaacgttttgccgaacagtttttcaacaagttaacataacttattagagatgaaggccttgttaagatcattggtaagtttctagaatgactctcatatctaaaaattcattaatttatcaataaaaatatagtgaattgaatatttaccttaggaaatcaagaggaaagggatctgaatacctattaattaaatttgcaagaaactttcttgaaaaagtgccgtatttcctaacatagtctaccatgaagggtatgcttatgctctggtaggacctggtcaacgctgcgattatttcaggcgcacaaactgggcttgagtgaaaaattgccagtctaaacaagtttctgtaacaaatgtgcttatttttgtcccttagacttgcaatatttgagattatcttcaagacgttttcagcaggaatgttttttactaatgtgtagcacagcatgtgatgtagtattggtaatggtaacctgtccacatctaaaactcttatagtctcaatacttgtttcttttctgtgattattcttatgttctttacccttatatgagttatttgtgtcctttaataacaatttttggtatcttttctcctttaggtaatttgatacatcaagctgaggtttcgcactggatggtcttctagatgctatctttgaagatatagataacaatttaagagttgagaccttacttgcaagttgtttatctttgatttgttggtcgatttttagtggtttatttctttcaagaagtaaccttaccctgtccttttccttcctttcaacagacaataaatggtccatttcatctgttagattaggctgtgtagatatttgattatttccagaactatatgtaaactcattcccataatttaccgaagaatcatgatctgtgttatcatctgaaaaataatctgaatatgggcctttatgccaacacatagctgaaaatggtgatgccaatccactaatttcctcatcaactaaacaatcttcagaatgtaaatgtgttgtatgttcattttccgaagaatgagtatcatttggagaagaatcatcaaggtatgtgggagattcctcggcgttacctagattgtttaatgaagaagaaaaggaaacattttgggtataaattgtttttggaagatttactctaatgagattaattgaatatggaatgtttgatttaaacaggaatgaataaaacctataagagtggaacatccttaacaaaaggatgtgatatttccagtccaattagacattactacatgcgaaataattgcaaaatattatacatataaagttttatatagtaaaaattgtaactatgtaaataaatttgaaattgactgtaaatgtgatgaataacacaatatatttaaaattttgtttatttaaatttcaatttttatttttaattgttaagtttgatttatgtatttatagattccggaatcttaacaaaatgtgtttaaaaatacgggacggtatcgtctatttatgaatgcacttttgtgcaatatcttaataaattttataattccatatttccataaatattatttgtatttatttatattttatattttacataatttttgtatgatcagatagattcatggaacaactttctatttctaatccatcgtttatgtttaaaatttagtaatctctgggtacaaatgacgaattttttttatttgaatttaatactttaataagtatataaatatattgatttaaatatggaattctcaactttggatcttagctggttgccaccagacgctgacggtatgttacacatttagaaaaataattatatttatttgtagagcaacttgcccttggatttagagtggtttccaatgcatataaaacgagagtttcaggactagagtctgaaattaggtctttaaaatctgcgctttccgagaagtcagatcatgtaatttgagaaatatttagttaaatttaaacctaaaatactttaattaataattttatatttagttgaacgctttgcaaaataaatataacggtttggaggaacagttggtacaagtgaatcagaggggaaaccaactttttgaggaaaacaaaaaccttttaaacactgtaaagaagttgcaaaaggacctagatcgcttagagaatctaaagaaagttgttttgtcttcctttcaagatgaaatgaaggattttgatggaggaactaatcgttattacagtgatgatatgccaagtgccttgccaccaaaccccgttgcaggtatttaagaacttttaattgttttttagacttaaataccaatgatggagctgatgggtttttaaaaggtcttaatttcacaggtgcttcgagaccttcacaaggaaatcctccgtatgttaaataaccttaattattttttagttctgtaagttatagaaacacagttgatggtagacaattttttaaaaatgctaaaactttattaagtcctgaggatttttctaacttcctctcaactataaagaaatttaatgctcaaattatgactagagaggagaccctttctcatgctaggcaagtctttggagatcattctaaagccttcgaagagttcaaacaattgctaaatccacggacctagtctttaataagcgttatttaaataaactgtaattaatattttatattattacccccgacacacatccagtgaattccatatataaacattaacacataagcttcatatactgtttcataacataaataagtgtgtatgaaattaatcttaaacattttaattattagcgtacatgatgttaaaaagcagtttcgggtcgacattcttaccctggttcttctggcaaagtatctctatttgcctcagtttattgtaataaaagtctttgctgagattagaaatctggcattccatcctaatttccttaagtttctttttcaaaattgatatctcctctttctgttgaatcaattgctgagtgagatgctggattgttttatttggagtctggtttctatttagataattaaagcatttttcttctttgttaaaaaatgttggatcgaattctgcggaggattcgttgaatgtggttagagagtcaagttgttgtagtttttccggttcacaaattcccgttgtttcatcggaagaaagaggtttcaacttttgactagatttattaaaactagattgactttgtgttgagatttgaggtggaagtgcgaagcttttatttgatagtcccgactccatttgaataatgttattaacttttgaaatgtagtcatttgtgattgaatctgaccaagcccactttggcaataagcttttaacatttgcgatattgacttggcggttattgtagatgagcagcttgaggattccatacactctcttatactgtggattgtagttgaaatttttgtcaaggtgagactcgacatattccttcatccactgtaaaaattccaaattttcttggtatttccctcttactaatttttctactggtatatgtttatctatgttacattccttaaacaccgattgtagaagtttgtaattgtacaaatgttcgtattctagtgtagaattccatttgattcttacaaatggtattttattttggtatactgtatctatgagttgcaaatatattgctccattactgcattgatcgattttctcaactttgagttctaatattttatttagccacgccaacagttcagttctaccaataaattggcctttgtccattataaatagtcatacgtaaaactttataccattagaggcggaaagagaatatattctaaaacttgtcaactgagttgccacacatttcacatggaagatcagtaaaaaaacatgaatataaaagtgaataaattaaaaggtttagaccattctagccaagagtttgtttatcaattcctcacggttaccggcgtcacctaagaaaaatatacacatttatgtatattagatctaacaattgtatttaactagtatttgaatggtatgtatctaatattagtatagatgtatagttgtattatcaaaaactatttattttaatacctcctctagcttctgagaatccatgccttttagctacgaaaccctttcttggtggattaagcttgaagggccacaaaaagtttgtgacttgcttgaagtgaggaccacaggtgtacacttcatgtactaaatcttccattgagtgtacgccgtactttcccaggtgcttgctgatcagatcatcgctatttaacctaactctttgcctagctcctggtttaccaaccttggctaaaaaacagttagtgttaatcattatggaattaaatacttatagattaatttcttaccataacctctcttgtacagaagctttctaactgtggataacgatgggtatccatatgtcacataggggtttaccaatttaagcatctcaacagtagccttattgagctttacgaacacgccgttgtggagttgaagtagtctgaaaagtctcagggtaagcttaggcttcggtgtcaacttgttaatacccttaatccttacaacaaaagcaacttttgagtcaggttccttataaaaacttccttctgacttagccttacgtctcagctcaaccaactctctttttctatcaacgtactccttagcatactttaaagcacgttttttagctcctgctactcttttcttctttacttctgttagacgttttgtttttttagcttggagttcacgtaacttttcattatgttccatcttctttcgaagaccctcgttacactcttccttctttaatccacggaaggatcttaccaagaaacgactctatataaaattattaacattatttacataattaaatagaaaatactaaaaaaaattaagaactcaccaccatagctatgtatcaaatagaggccaaatatacaaattttaatttattccctaaaaaatgtttgtttattgtcacaataaactaagttattgatgattataataaaaaacaaaagcaaattatatataaagttaggacttcaaatgtgggaaaaggttataaaatagataactgggtttgtaagggtaaataatagattatctaaacttacttaggaattaataaataaatacagtagaggaacttaagattttttatgattctggaaggtaggtggggcatcctattgatggtatatatatcgtataataaatttgaacatttcatttaaacactttgatattcattctacaaaacatatgggctaattgttaaaagtctttttagtcagtttgccaaatatttaacattgtcttttgatggaatcttttgatcatatataagatataatatattattatgaatacaaacactctggatatgtacaaataagacaaaataattcaagattgataaatattagatatatgtgtatataatttatatgtgaaagaaattagagattatgatcttggtttttccttcttttccttgtacagagcgagtaaagatactcctgagaccttaaccaccttaaaacggacaccaggaagatcaccaactgagtgtcctgaacgtccaaaccctgagacaagtacttcatcgttttcatcaatgaagttcaggcaaccgtctcttgggacgaaagcagttatttttttaccatttttaatcaattgaacacgtacgctcttacgatatgcagagtttggctaaaaattaatcagtttaatgagtatagtaataactaaactttttgtatataattgtagcaatggaatctttagagatagaaatccccttttaatcaacctttgctgatgttatacccaaaatattgactcttggaaggatattccaagaaacacggattgggaaagggaatcagtagttggaaaaaaatgaggatcaacacaaagatcaaaaattgaaacatatttataatcaaataaataattgtatatatagtttattgaatagtttaatatacctgttttgcctcgatggcgattttttcaacaactatacccttggcatgagaactacctttgaatgggttacacttccaacgtgttcccaagttagcttttttatatgctttatctgcccatctctgttttcttctgcggttacggagcttcctggcagctctgattccacggggggctcctataaatgaaatgttaaatatagggtataaattaaaacactgaaatacagtttaaaatgtcaaatctattggatctaattaagaaacagtaatatttaatagggtagctatggaagaattatgataaatccatacctgatcccattttttactgtattgtaaaatgttaggaaaaaaactgattaattattcttaaacgctggcttctagtaatcaattaataaaatttataaattaagaataataaatcaaaggttgttaaaaaatataatgattttgctgaattttgatctagtgatccccatacttcgcaatagtgtcaattttgaacacagagaatattttatccttatctttctacacatttcttaaatattaagattcctttcattttaatcattttagttccgtttaacataatttattataccaaattcccttttatttgtttgttcaattttcaccagttttccatttcatcatccccctaggactattttttaataaatttaaacatctctaaataggttaattgatctatttaaccatatattgtgtattgattggatttacgacattaatgtttcttaactatcagagatggcctaatattcatcgcttgaagttcttggaaaagtaatttacaggcatatggtagtgagacttgagctaatgagttgttttggcagaacttgcagaagttattgtaacccatgaatccacatgaactacaaacctctatattgaaaacgtctgatgataacatcagcctctcaacgagaagatttgacgatccataagcaattaaacaatccctttccatttctcccaatctcaaacctccatctctggacctcccttctgtcggttgtcttgttattggctgccttggtcctcgtcccctggcatgaattttgtcagtaaccatgtgcttcaacctctgatagtatataggtccaatgaatataagtgtgttaattgggtttccagatattcctaaaaattatacgttaaacttataattatatataacaaataaatttttatttaagtacgtcttataattaatagtaacctgaatacaaaatctcctttcctttggggtgaaacccattcttaattaagatatcacatatgtcactcattttattggatccactattattcaagtcattgcacaagttatcagagtatgaatttgaaaagggtgttgagtctacaaaatttcctgaaaacactgaggatttggatgccaccagttcaagcagctttcccaccgtcattcttgaagggaacccgtgtgggttcataatgaggtctggcactattcctgactctgtgaatggcatatcttcgtgttcagctatcaaacctaccacgcccttctgcccatgtctgctactgaatttgtctcctatttctgggggtctgctttggcgtaccataatcttgtacatcttgtttccattgtaattttctgtcaaaatcaccctatcaatacatcctccagtgttcaggttatatttgttcactatatacttatcatcgtttcctgttttttgattcttgtctgtaccctttccattcattgatccgttggttgtgaaatctgttggtggtgccttggttgatatcagtacctgtcctggcgacacttgttctccaactccaattacaaattcattattggaatctgagtctttattttgagacttacttgggttgaagccattaagacttgtagcgttaccagacgtgatttcacatgtgagtcttctcagggtatagcatcttgcaaatcctctgtctattgaagccttgttcaatattattgcatcttcaatttcatatccttggtaactcattactgccactattgcattttgacctgctgggagcttatcaaaattaacaagctgtattgtctttgtggtcaccagtggttgttgtgtgtaattcattaggtgtactacggtatcacatctttgaaattggttatatcctatcgatccgatactttgctttcccatagcacattggtatgtgtttcttgggctctggttatggttcgggaaaggtatcaaacctgccacaactcccagtatactcattgggctgatttccaggtgtgtcgttaggttagttatatctttttccctcatcactattaataaattattctcctcgttcacgtctatccactccagaattccattattgaaaaggtattccatcttgattttatctaattaattattaaaagtgttaaatagttaataactacaatggtaaataaaatagtgttactttctactagttgttgaaccaattcgtctgtcaatctaggaaccgagttttgcaccactatcaagggacgacaaagtcttcctccgtcagatgatatgtggacttgattttgttgtgagttttcatacactgatacaaacatgttgatgagccctcttctcctaagtttgattatactatttaccaggaatttagcattcctatgtatccccagtaatatcccgtttaacaacaccagtcttgcattaagtagattatcacacttctctgaagtacctttccatgggttaaacatgtcatgacttgatagtgtgtctattggctcaactcctagggtaaataaaagagtttctaacactggtgttggtacatctgacgtcacatgtgtcattagacttagattttttaccaaaccgcacgattcaccttctggagtatcacatggacataaaatgccaaattgacttggctgtaatgctcttggtccactaacttttcttcccttttcaaattgtgaatcagtttttgtcatcattcctacatttgattattcagtatacaacgttattgtaactaattaaacaattaactaatagaattatgataaatttgttttgaaattacctattgatgatatatatgataatcttgacaggacttgggatactccgctcttttccatcctgaaccttttaatgttccaatttcctgttgctatagcattttgcatcccattagtgataatgtcagttggcattaaaccaaatatatcagggaagttactattttctcctttcgcggggtttgggtttgcctctaaatatttaactaatatgctttctattgattttttcatgttacttaagaattttttgtaaaaatcctcaaaaagtatagagatcatctgaccggcgagttccagtcttttatttccgtaatggtccttgtcatccaaaggttctacgttatttactacatttaggactctgtgtgccattaatgacagtgtcttaatcttgcctgagaaatctctacaatctttcattggaatgtgactcagtagtactctgcttaatatgtcgtgtgtgtcttcgagtatcatttgcttactcttcggtgctctatccttgttgctactaaaaaagcccttccctagtactctcggtcttattttcttacctatgtacattagcgcatctagtctactattaatgtcctcgttgtacaaatcattgaggaatgtaatgtaatcaagtccgtttggtaagtttgaggacggcgttgttaaattatttgaatttttaaaggtggtagggctgttagatatcagttgtattatttcatgatctgtctcaattcccatcgcctttaagactatacacagtgggacatcatctgtaaaactgttaatccttaaatacagctgtgaatttttgtaaaccaccgcagttctactctttgactctgcagtggcggacgtgactgttgcacagatattcttctttacatccatttcaactattattctactcttagaaagttgttcttgcatcaagataaccttctcaactccctttattataaagtaaccacctgggtcgtaggggcactcgtctagcatgtaggatttatagaaactctctctatcctccttacttaagccatctggaatatcaaaattgtttttcattgactttttagaggagttgtattcagggagtccagatgaatcatggtctgagttggattctgaatcactactcaggaaacatatacagctacggagcattactgggattcttccaatctctaagttttccttacgcgtgaaagtgtaatctctaaagtagtcaatggtaaccaatattggtgcgctgtatgtaaaatcacggattctacacaactgaggtgtgagcttgaatacatgctttgaatgatcagtaaaaaaaggtttcccaattttaatatcaacaaattccaatgacaagcttgggtacaaatcagtcctcaatactttattactgggtgcgttgatgatatccttgatttcgtgtagaacaaaattgttatatgagtttatgtgttggcgagctattcctctcattcccatataacatggaagaatcttccatttatcctttatttccttcactggctcatatatttcatatctgtggacattagaatcagaagattctggttgcttgaaggtaacagtttttgttcgtcccatatcaataaaaattacgaaaaaatttaagaatcccccttacaaaagtatttctatttattttgaagaaaattatatggtacaattggatttatttttgaaattttacttagatacagtgaaaatttattcataattgtatgaaaacatcgagaaaacaaaattttatccggatttaaatacataaatggccaagattttgattttttgagaatataaaacgaaactgaaaaacaatctttatcatttgttggcttgtgtaaatcactaattagaaatattaacctgtggggaatgatttattgtttttataaaggaatcacaaactattttaattaattttgcctttattcatttatttaaatataacagtttggccttatattaaaaaattgtaaaaatagggtgaactgtttatttttgagaagtttgtgttttagactatgattcaaccataaagaattttaactttttgaggtgatttccgtttaaatcacaatggcagaacattttgttcgtttcaatcgatttaattatcgaaacgtgagtttttctatttagtcacattgttctcaattctatttaaaaattattaaaaccaatttatatcagtttaaacaagtttcactgtactaataatatttttagaactcaaatctggttatccagagagaaggacctgctccaagactcgatgaatccacgggtgaaccagaatctttagcaggtcgcatcctacacaaaatgggcgataaagtgatgcacgaagctataaaaccaaaactaaaaaacaaaagagctgcccaaactgtccaagatgaaccttccagaagacgtaaaacattcttggtatgtaattttcattaatttttacataattttactaaatattgtttaggacattagtagaggagaaaacgtgcttaacatagatataaacgtgggtttgaactatgtaccaaggagcggatacacaaggactaagtaccaggaaatgctgacaattctccaaaagatactaggagaccagccacaatcagttttacttagcgcttgtgatgaaactttgctttccttgaaaacagaaaactcggcagaggaaagaagagctttggtggaggatgtgttgggtccagtttcagatgaagtctactataacttattccatttgtcaaaagagcttacagactttaaaatggcatcagaacaagatacggggggagatacatttgacgatactggattggcagtgatatttgatgaagacgataatcaagatacgaatgaagtagtggatcctgaaggagaagaagatgatgaaaacgaactagatcctcaacttggaatcagatacctcgggtcagaagaagacaacgcaaatctcgataaggaagatgatctcaatacaaacaagatagatgggtattggcttcagagagaacttaactcaatatacaacgattacaacatcgcacaggccacagagaaggagattctgagtatcttaaacattgaggacgttcaggagtgcgaaaataaattggttttgttgcttaagtatgaaaactttgatttcgtaaaactattgttaaggaataggtataaaattatatactgtacaagactgggacaagcacagtcacaagatgaaaagaataagatatttgatgaaatgtcaaaaacagcacaaggacagctggtcttgcaagagttatccctgataaacctgaagaagacaaaacagcaacttttgacacataacttggaaaaggagctaattaatatgaagacaggacaccacaaggatttggaaactaaaaatgaagatgagttggaggtaccagatgagtttgtagaaacaaaagaagatgtagtacaaacagcaacaacgacagggttacaggttttggatttggaaaatttggtaataaaggatggagcacaacatatgactaacgtaaaggttgttttacctgaaggaacagaaagaatagaacacaagagctatgacgaggttataatatacccggtacaacatatgccaaaaagtaatagaaagaagatagaaaaactgccaaaatggtcacagcttgcatttaagggtgtggatactctaaatccagtacagtcaacagtctttgaaactgcattcaacacttcagaaaatatgctcatatgcgcaccgacaggctcaggaaaaacaaatgtggcaatactgacaatattaaatgttttcaaaaagcacctgacacctaaagaccaatctcttaaaactgactctagagtggctggggagtccaatgacagtttggatggattggagttatcagattgttattttgacaaggagtttacagtaatatacatttcaccaatgaaatctctagttcttgaacagacgcagtcatttaatttgcgatttaaagattatggaatatcagtacacgaactgacaggagaaatgagcatgtcaagaacccagatccagaacacacaaattatagtaacaacaccagaaaagtgggatgtggtgacaagaaaggaagggatgcttgagagagtagagctggtgatcatcgatgaagtgcacttgcttcatgacaagagaggaagtgtaattgagtcgttggtgacaagaacattcatgcacgataaggtcacaggactaaagacaaggattgtgggattgagtgcaactttgccaaactatggagatatagcaaagtttttgagagttgatgaaggattgttttactttggaaaccactacagaccagtaccattggaacaacactatataggaattaaggagaaaaaggcattgaaacagtataatataacaaatgagcttacatatgagcatgtgataaagaatattggagagaagcaagttttagtgtttgtgcactcgagaaaggagacttacagaactagtaagatgattttggacaagattgtaagtgaagataaactagaactattcatcaaggatgttgcgtcaagagagattttaacaagtgagtcagagcatatcaaaaactcaaatttgaaagaattgttaccgtttgggataggaatacatcacgcaggattggtaagaagtgacaggaagttggtagaggatttattttcagacaagcatctccagcttttagtgagtactgcaacattaagttggggagtaaaccttccagcaggagtagttatcatcaaaggtactcagatatacgtacctgagcagggaagttgggatgaactgtgtccactgagtgtacagcagatgatgggaagagcaggaagaccacagtttgatacttttggaaagggaataataataacagccaatgaaaaactacagtattatttatcactcaataatcagcagttgcctatagaatcccaactaattgcaaaactgcctgaagtactcaattctgaaatagtgctcagaaatataactaatttgcaacaggccttagaatggattaaaacaacgtacttgtacgtcagagtaaaaaagaatccactgctttatggttttgaaacagaagatgaggaactagatgaagatgacaacatggaaggggaagaagataaacctgaacctaaaatagatatggagaagcttgaaaattatttgctggtcctaataaacagtagttttgtacatttggagaagaatggtctgataaagtacgagagaaagagtggaatggtgacaagcacagggttgggagttatagcaagtaattattatttgaggccagagtcaattaagatatacagtgatagtttgagaccaaatttgacagattcagatttattgaacattttcagttgttcagtggagttcaagtacataccaaccagagaagaggaaatagttgagcttcaacaactccaacagcagatcccaataccatgttctaatgcaaacctgacggcaacaagtacaattaacagagtagcaggaatagggggaaataataaaataagtatactgttgcaagcatatataagcagattggatttggatggctatgcattggttagtgaaatgggttacataacacaaaacgcaccaaggatcttgacagcactctttgtaatcagtttgaagagatgttggagtagcctgagtattaagttgtttaacttttgcaagatggtggaaagccgcatgtggctgctaatgctgccactaagacacttcaagacgatcccaaacgaagttgtgacaaagttggagaaaaaagatatcccatgggtacgctactacgatctcaatgctgtagaactgggagaactatgccgtaaccagaaactgggaaaatcactttacaaatttgtccacttggtccccaaagttaatttgcaagtatacgtccaaccactaacgtgtaatagaataagtgttcatttagtgataaaaagagactttgtttgggattacaagtatcactttaactatcaaaagtttctattagtcatagaagacccctcagaggataagatactctattcccagtcaatattgctgtatccccctacaaaaggaagtaacccaaatcatgaaactactaatcacgatgaaggcttgaatgataaggatgaaggagaaagtgtagatgatactgacatatacttgacgttgccaattcaggaaccaagagtgtactgctattttataagggtaattagtgataagtggataggaagtgaaacaaatgtgccgataatattcaataagttaacattaccaaataaacaagataaggtaactacactcctagatttgcaaccaataccaacaaccacattggttaaatcagcttcactaaacggtagagaagacggtcaagggattgtggcctctaaagatgaaatggaaaacttacttaaatactatattcgcaacttcaagtacaaccatttcaataatatccaaactcaagtcttcagcagtttctactgtacagatgagaacgttttattgtcagcaccatatggttctgggaggttcacatgtgctgaactggcagttttgagaactcttttgcaattaaaggaaaaggccacaatagtagtggttgtcccttttgaaaacttgttgagaaagagatttaagagacttgtgagtaggtttggagaggtttgttcagttgccgagttgacgggggattttaagcaggacttccaagttgtgctaagtaatacaatcacagtaacaacagcaaagaattataatcatcttcttaacagatataagaataaactgatacaaaacgttaatctcttggtatttgaaggagtggagttcttgtcagatgaactttacggagtgagtattgagctttgtctaacccaactgaggtactacacgactttgtataacagtgtggagcttaagagagaagattcaggtaacacattaaatggaaatagtgtgatgatgaataacaaaagtaggcttgtggttattacaagtagcttgtacaacaacttggatgtgtgtaactggctgggtattaacacctattacaactttaacaactttgtgaggcaagtcccaataacagtaaatctgtatacattcgaccaaattgaccaagttacaagacaaaactcaatgatttcaacaattaacaagtttgttacaaataaaactaaagttctaattgttaccacaaatacagtgtacactaaacacctttcgttgattttggacctacatttgaatggcccacaacaaaatcacgtgaaccacaatgaacataattctcatttagataaggccagtgggtcagctgtgtctaaattattttctaaatacaaactgtttaatgagttaaaaagtgttctgtatgcatatgaagggttcagtgaggatgaggtagagttggttgagagtctgtttgcaaaggaccctagatacagagtgttgatagtcaccagtcaagtgttatggaaccttaacataaagtgtccttacgtcattgtggcagacgtaaacgcaagctacactaaccgtcccttagttcaaaattattacacacaatatgaccttcagtatatactgtccttggcaaatcccacatcaaattatgacaaatcagacgatcatgaggatgaggatcttgaatgtatatttttgttggaaaataacaagaaggaggaagtgaaaaggatgctatatgactcagttgtggtggagagcaacctggagttgagtttggaagaagcactaaataacgaaattgtaagaggacttattaaaacaccacaagaagcaattgactggctaacctggactttttattacagaaggctttcaaagaacccaaattattattctttgattgcaacaacacctcaacacttgtcagaacacctatctgaattaatagaaaatactatatacaatttgaagaacatgggactgatacaaacgtctcaagacctacctgattctgaagaggagattgaagagataatggcagtaaacctgggtcatattgcctcattttattcagtaagatgtggaactattgaattatttgcaaaaaatattaaggaaaacacttcaagagatcaattgctacaactgttatcaaacgcgcaggaactttcattagtacagaaaagaccaaatgaaaaaatatttaaacaatatctagaccatctcacagtccaacagaaagtattacttttactcaaggttttattataaatagtctattagttatatacaatttaagttaaagtactatttaaaaccttggttaaaatgttacatttatttttagtgccacatggagagaaccattttatcaaatgaattatttgtggatcttcactttgtccttaaaaatgttacaaatttgttatatgcacttattgacgtgattagcagccatgagtacttgaagcctgcactattggctatggaactaatgcagaggatagttcaggcacttactttcacagattcacccttgttgcaacttccacactctaatagggaattcgtatctaaagcaaattgtgagtttcatcattcatttttatttatttatatacaatattactatatatgaataataatttatttttagcaatgaaagtcaatgatttatttgattttattgggatggaagacgacgatagaaacaaactcctttctagctttaacaaatctgaagtactggatatcgccaatttctgtaactctattcaaatactggatattgaattcaaattcaataacaaaaacgttaaaccttcgcaatcagtaacgttactgctgaatataaccaaagaaggggttagtgactatgtttatttttacttatcactagatatatatgtaaataattttgtttagaacaacgatgttattaacgctccttattttcctgtcgacaaaaaggaacagtggtggattgtcgtaggcgacaccaaagataataaactatacggaatcaagagaacctctctgaacgaaaccaatagtgttaagctggacattgaagctccttctatgaagggaaaacacgaacttactttatacgtagtcagtgactcatatgtatcaacagactaccaatataaattagaactaaatgtcgtataaaattttaactataatatactacactatactacattaaacattaaaataccttacaaatctgaaatcttaaaactaaactacattaacccttatctcatattagatactgaaatttacccatattccttaaatgctgttcacaaactggtattccataccaggtaaggaatattcctagtggcaccatgatcttctccctattagtcacagtctctatcatatatctgttcaagtaatccagcactgtatcctggtagttatctgaagtctgatatctaaactcagtaagcttatcagtgtagtccttaagtgatctatgctctgaggactttacgggtacgtgaatatcctctggtgtctcataggtttcttctgtattaaggatactaagcttaagactggcaacggtatcccttattgactcaaatacgtcacagtcagtttgcttgatattcggcttcctaattatgaactcctgatatctggtgaactcatccaagtactctttggagaacttgatctttagaacatttttctgaacgcaaccagttccatcttaattcatctaattatatgtttatttatcgtattatatctagtggtatctaaatttggtagtatacattttgatggattttggtaatttaactagaaataacaaatctcctgacatggatgagggtcctaatatcacatcatcagcaaacgtgttaataattcgattactgatatagctatggggtcttaggtcaagattgtagtttcatactaaatgtatgtataactcaactagaagcgatataagcaagtgataaatatcatgagggttgagtatgtattgtatggctataaactagtcgatcacaacagtatcactagttgttcattatgttaaacttgctagttaatcagtaaaatactaatgaattcaataatatcccaaaatatccattgacatctgaaaatgatataacatgatgtcaatatgtaataatttggaacattcgataaataaatcacaatatgtgatgatcttaatcctatctgaagagttactaacaccctaacactcaattaattgagattactatgagtagctataaagacgacgttgaacacaatagatccaatcggtactctagtctgtaccatgattggtttatgattggtataggatgttttacatacttcctggttggtctatcacttactctggtttatgtactatgtgagatggattattttatgttatctggtttatttcgtattcaaagattcttttcagacgatgcatattacttcagtaaacaggtaacattaatgtatggtgttattggattcatccttacattgctgattggacctattggtaaggtatcatgtatattatggtcatggatcctaacactgacatatcttgtgattggaacatactcgtacttgattggatttacacagtacgggaagctcttaattagatcaatgagcatcatatcactcataacacacatccttatgtgtaacttcatattcttcctatttgatccaatgcaaagtggtcataccaagactaatgaaagtgtctcatcagaccataacggcaaacactcttcagttattggtccatacggatcacttgtatactatagggtaatattgtttctcgtcggattttttctcggatcaccaattgtctcatttgtcctgaggatgagtctgtcggttactacattctctgaaaaggacccagtaatgtcttcagttgatttgtgcagaataatgatgctgatgttctcaataaccgtcacggccagtacattcctgacgctcacgttctcaaatggcctaagtccaaaaacagatcacatttggtttccattccgaatgatatcttacaggacatttaagaagacaatgtttaacttctttgacctagagttgctacttgtggtatggatcgtcaatcctctcatcatgactctaattccatacacaactaggatccacttcgagtttcacaaattctcactagttcacaggttattgttctcaatgtttatgattgggataatggtactcatgcatagagatatactctacagctgtatcagtaccattaaactaattaatgcatctatattcaacatactgtatactgatggatacacacagatatatgatgaacatcttaggaaggaaccagtatcaacaactccatattctaactacactgtgagaacaaacgttagtacagaaccgatggttgttccacatgagatttcaattcaatcagttgtatcatatccttatcttgagaatggctgggatgatgttgaaaatgaagataaaaagctcttatggaggtcatatcacatgcttcaatcacttcagagactaacacatctcattaatactggaggtgatatggatatccgtaacatcttctctgacccagaactatcactgtgtaagccacaaatagataattcagatgatatatcagagaacaatgctgatgactcaatgaaaagcatagtctttctactgaatgagtacagaagtgagctgttatcaatgttaggtaatacaattaatagatactggtttgacaaattcgttttttcacgttctgaatgttgtacaaccaacttgctttttcgcatagttctcactttattgatcaagtttaaaaaactggattcgtcaatttctcaattcccatcatgtacatgctattcttctattatttcccttttttatataattttacttctctccgtaattgctacttcaaaaattttgttcaagttaactgatcacatgactgaagaggaaacacaaaacattcagtctgatcaatcgctcaggtctactatactattacagaatatatctaggttgacaaaagatttgaatgatcttgtttggattttactgtctaatagttcattacttgaatctagaatggttttgcttagattatgtgagtatgaatttaaagtatccgctattctcgaagtactcaaaccagttgataattgttgttgtgtttgctgttataaatgcaaaaataacaaggttgagggtgaaaataatgataataataaagaatgtaatctaaaagaaaagttgactgttttaaacccaaaaggtttgagttcgtatactgattttttatctgaaaacatagttgaaggaaatcacccctgtatgtgcatagttattaagtatcgattaattgaaaatgtcaagatatctcgatgttatctccgcaataagtctcttaacgtcttaagcactattggaagaaaatttgaaaagcattcttattcagcaactcaacttttggatgtttcgaaatttatttattttgttatagacaccttgttaaatttaacattttggatgaaaagaagatatctttgtaattgtgacaaaagtaagtgctgtagctctgatggtaacaataattgtacatgttgtaatggtgataaagtaaaatgctgcttgtgtccgagttcgaaatctgaatgtaaatgttcttgtaaatctggtaatacttgcaacgaattatgttgtcgagggcaatctcacagtgggaataattgcgtttgttgtagatgctgttgtagttgtttttgcaaaaagtcccatgatgaatattatttctatttcataacaatgattttttatatatcccaactctttgaagacgtgttcacatttgacaatgaaaaaattcgaatggccatccaatttatatccagtttggttttttattatgatccattcaatttttctaaaaattcattttcatcaaaacgtacttttataaattattacagactcgttttgaatcctaaatcagatccaataaccaaaattgaatctggcacaattttaaaactaataaatggtcaaatagttttttttttcagattttccgagataaccataaatttgaattcagaattgttcaaaaaagtttttcaaataatctctgaactgatattttttataattaaaggtggttttatttcaaccaaagttgatggaaatattgtaggaatactaattcgtctttcaaataaatatattttgatcctatttaatgaagaattaaaacaaacacagcaggctttgaattgtcatacagataacaataaatgcaactgtagccgttgtaaaatattttggtcgtctttatacttattttccataaaatataattcaatagcttccctgctacaaaatcttgggataataatttccttaaatataggtttgggcaaagtgaatatatattataacgaattcctgataagatttaccaagaactccaggataagcgaatctacacatggcctgttatatgaaaggaatggtaattttgaccacattaatcctaagtactttggttacgatgatgtttatagacccagtccacagtttggatcaggatacttcaaatttgtgattaccagagtgttcactgtcattgtactggtggttctgttcatattcataaggactagatttgacagatttgtcaatactgatatctttggcagatacttgatcaaggtagactctaacattggtaggctcagggaggtacttcacaacagactaagtcacagcgttaggaacattagcaggatgggaagtcttgacgatctcctaggtgacatgacagaaggtgatgttggtcataacctagtctttcatcatccagagcggtatcaagatgtcattgataatatgggtatggctgacatgggtcactatgatgctatgtctgatattgacacactttctgacacattcacagatgccagctttgatggaagcactaaggctgtccaggagtccaggagaagaaaggttggattctacatcctcatcattgtgttctcacttctgtctgcactgtatctgaactttgtagttagagacctatctgtaatgctacagctagatcataccacctggtcttacttcataagcattacggtgttgatgggtatgatcatcagtctagtggttaagtattgtgtgcacctatatgacttcgtgtatgtgctggagaactacagtaataagctgactaagattgagagctttgtcgatgacagttttggtggagtcactggtaacctaacttacacatctaagtttgtactgctgttccaattgctgaggagtatgaagactgacctagtatctctgtttagtatgaattatccatatcaaatacctgcacacagtctgatgaagaataaggtatatccctacaaggacatgactggtggcatggagagaatgatgacatgtgagaacatcgagtgtatcaggaagatggttttagagtccattggcactccagaatccatggatctgcaaaatgtacttgacttcgtatcttatgttactgtcagaaacacagctgagtttgatcagtaccgtggttactttagtggctttgaacggtacctggcttggagacttgggaaactgcttggtcataacttcttcctactgacctatggcagatactcatgtatgcttgagatggatcataggattaggaaactcagaataccaagcacacagtttcttaactgtcagttcctgtggcaactatttggcaattatgaatctgacctcatatcactcaagtgcttgggtgaagattcaataggtattccactaacgcatgttcagaaggatgtcctcaagaataagttcgctgatgaataccttgatgagttcaaaaagtaccaagagttcttgatcaggaaacttcatattaaagcctctaagtgttatgactctcccagctgttactttccatatccagaactcatcaacactacacttgatagggacaaagtctctagactgacaagagagtactttggtgacagcagcagaagactaagtctatcactgccaacaaccaactgtgatgttacaaacaagattgtcaacggaaaaggtgctgagtcacctggtgtttcagttactcagttctgtgatcattggttatatatgagacttggttgttgtgagactgaggattgtgagaagggagtcagattcgctcacgacctgataatgtcaaaactaaactgtgaatcgcatgtatttgagtcaatcaaggataccgttgccagtcttaagcttagtatccttaatacagaagaaacctatgagacaccagaggatattcacgtacccgtaaagtcctcagagcatagatcacttaaggactacactgataagcttacagagtttagatatcagacttcagataactaccaggatacagtgctggattacttgaacagatatatgatagagactgtgactaatagggagaagatcatggtgccactaggaatattccttacctggtatggaataccagtttgtgaacagcatttaaggaatatgggtaaatttcagtatctaatatgagataagggttaatgtagtttagttttaagatttcagatttgtaaggtattttaatgtttaatgtagtatagtgtagtatattatagttaaaataatatgtttttactaagcgttagaacagtgataacaataccaggaatccttatccctaaaatctacccatactcctgcacatacgaaatgaaaccaacgttcgcatttgtcacaacctatccagtgaagctcatcaccagggagaccaggcgagttttcaaaatagatagagaagcaaacaggacagtagtagtcaccgttatccaagattcctgagtgagcatacctgagaatttcttccatggacatcttgcgccttttatcaacatctgagccatccagagattttggtttccttcctctcttgcttccttgtatgggcttgagtaagccatttttaatcagagtaatgatatttttgatgtctttaatactgttttcccgactttccttatacgattgaacataaaagttgccgtgatggggagatttctgatagaagatgtagttcatgccctgtattagacgatctcttgctattgcctcagatatggttaaatcgtacagttgtggagttttgttaataattaacccgtagttgatatacgatgccatcttcatgatagatagattattcttataatctatacttctagacctctttttaatttttaacttcgttgtcagtttagccctgttatttatacaattaggggagaggtaaactcccctgaagaatgatgcgaagtaattattattcacaagaacttcgtacaaataacatggtgcaaccatgaatttacgttcagatagtgaagttctgcaaatgcttattaaggtgtgccttaaacataatgctctcttaactccaattaagctttcgttcttctttccaacgtctatcttacatcccaagaatgctaaaaattaattataaatctggtaataaaatatataacttaaatatttcatagggttaacaaatggtacctgcacatgacgggtggaactttgatatacatgaagtgttcgagcaagtcactgttgccccagtttgcattccacaatagttacagttctgctcaaagatcgctctgttgaacttcttcgaattcatatgtacgttcttactccagtacagccactctaggcaaacaagatgtacatagctgtaattattccaaaaactcgttctacaaaggtgattagtaatgtgttggttcagtaaattattagttattatactgtgcatagaatagttaatagtatagttacagtatatctagtgtacaaataggtataggtggatgaaaataccttgatgggacaaatgaaagcagttttgagtttatcttgagcattaggccatcatatctagagcagagaacacagttgaggagaggcatgtggaggttttctgagaactccttacatcttatacaggagaaatagaaatcatccacctcttgccctatataatccccgattatcattgttgacgagttggtcaggtgttcaaagtctgtcttattgactgagagacaagagttgcaaacctcaacgttgcagttgatgcactttctgtatgactcgttgtatatgttcctcttccttttattattgtcaatatcattctcaatatacttaaactcgaggcagactttacagatggttatcttcttattgttaatgtactttctcagtatagaatttggcagaagtgacttatccatctttattatttcaacttggttgacttgtttaagcaagttaaacaccttttctttcatggccttctttgcatctctgtccttttgaccattatccttcaaaggtgttgcgttgttgttaagagaattgaggattttaggaccattatttgtggaagtgttagtcttatccaccgcattgggattagtaccagtagctgaacgacctagttgattcatgggagccccagctctctcacttttatctctatccctgtgaaaaatatccttaatgagaggcgtcactttagataaagttcctgagaagttaattgagtttgagtgggtcgtattttgaaggaatgaaagaagattctggtcgtgatgcttcttgtgatccctacctgtaccgttgagttggactttatcactcctaacactatcacttcgatgtgtagtacttccactgactgtttctctgctctgatctgagagtgaactaatgctattaagttttgggaccccgttacctattctcgggtgcatcatgtctaatctcttttctagtaatttgtcagagttcatgtaattatccattgaagggggtgggtggcagaagtataaattgttgtagccgtaaagttcgtcaatctcatttatgaaatccacgtgcttcagtagtgaaaacagggttctaaccacaaacgttgaagagtcaggctcaaatgtgttaaatagtctaactagtgcttctgacgccatttttgggactaggaaatcattctttttaaccaacttgttattgttaaccaagtctccattaatgaaggtgttgattttatcgtcaactatgttatctattattatgttactcaatataccccaaggtatcttgaactcttctctactatcctcttttgtttttggcttaactaacttctttccatcattagtgctttcatcactttttgacttcgttgtctggggcttagatgtgttagaagtttcattgttttctggatcttcatattttgaattaataattgacttgatggtggtaacattggcttggttattattatacaaaatactaagtatgatttttgatgacggtgtcttatcatcaaatacatgcctgttatgattcttaagatcatatcccaaacagcaccagaagcagttactcttgttaatattattcagtggacactttcctttcgagtaaacctgtttagagggatcttggttttctgtcattgagcttttagttgataaaactaaatcatcctccgtttcaaactcttcatctggcaactggaaatcaaatgtgtttgatttactagtgactgagtgatctgaatcctccgatttaatgctgtttactctactacttatttccatgttactactgctgacgttagaactgttttgtgaactcgtactattctgtctgcttgatttgccactattagatgaaaagcttgaatctgtattatcacttggatgaactgacactggagttatcaaattgggtacatattcatcgtcttccttttcaaactccttgaatatactcaagtcatcgtcattactagataaatcctctgtattagattgtttgcttgaaacactccttgcactgttctggttacttgtgttgttactccctatgcttgaaaaccttggtagtacttctgttttataataatttgaggacatgtttgactggaatatggttcctactttttcgttcaacaacaactctaataatgtggtcaggttactgtaatttggtctcaggaaatggttaaggtacaggttctcgtttacgcatataccatcaattgcatctctactaccctttttatatcctgaatctctctctttacctttttcttccaattttgacctatcacctttatcactctgattatccaacttgtatttctctctatcagctgttctacgtctatctattttttctggtttatcatgcttagacttaatcaccttatctttgctcttgtcaccaagattgtatggaggatttaccttatctacatccaacttttctttaccatccttttccttatttaaattcaggcggatttgtaatttccttaagagtgaagttggtgctaatccttttgagtgtattggacacaaaacatctggttttccatttgtatcccatgtgaataagcaatttggtgatgacgaagagcaaggaacatgaaatgccttacaacagttcccgtagctgcactggataactgatgtgctccagttattgcagaaaatgcacttcagggcctttatcttgggtacgaaggttccataattaatttcatcatgttcaattgtacaatcattcgccattgcacacttgatatgaccccatgttcctgaattgcttgttcttttcatgggtccaccacctggcacaaatgcatcaaatccgcagaatatacaaattggtatctttagaactagaaacacttcgcccaaatcctttttaccagtttccttcttttcttgctcctttttcaaagaatctttattttcatgacgagtctcaggttcatttttatttaaattgaaatttatagattctgataaaagttttaagttcagtgacatatacatctttttcaaagggttcttgcagttgataataggattatactttaattcctgctttttattagacccttcttcatctactggctgatctagttcttttttaagttgcggttctggttcctttttcttactcttggctggtggttcatcgtcttttagtggtaacaattccttcaaactgttgattgataatgacctgtttgttgacaatttacttgtaatactatttgacctcttcttcgttacgtgttttgttgattgtattagtttatcttgttgaactagcctagagaggtacaactcttcgtatgtgtggtagtttaggtattcctggatccctatcaagtttgctctagatagtagtagccaaaagttgttttcaaagtacaatcccttctttgataacaaattcttacagaaattcttagggtctgacacgttgttatggttgaacattattgtttccttttttccgttatacaaattaagtatacttagcttttctaatttcctctcctttagtggttcattcaagatttctttatccccctttaacttttctaaactgacgatcgtaacttggtttgttgcaagctggtttgctggatgaactgttatgaatgaacgttccaaggggttatcatagtcaaaccccagtacgttaggaagtggatgcttaaatatatcatctttgggtttaacagaactggttaccttaacattgtctttattttgctttgaatcgccgtcaggcttggtattaccagatgtattatccttaccttggtttgtagtatcatcaattttatgggaagtataattttcatttatcatttccaagtgttggtatgttttggggcctgcaacgtttctgattgccgtcatgactaaattctcatccaaaaaaacaagttgctccatcaggtatgtgcacactgggcaataccactcatcctcatcagtgtccatataatcatcaagtttctctagctttatcttcttcaccggtctttctatattattcgccagatggttataaaagttcagtctatgaaatttgttcatgtttagcttttgtttcacatccgtcagtgtgcctggcttatatcccagacaacaaaagtgcattggaatatagcaacagtcgcaaaacaaaattgggtcatcatcccaatcctcatcggtcccacatatgctacacagtgctctgtccgtccatgttgatggtaaatctgaactcttgtgaactctcaacctcagtaacagtacatccaaactttgtctttgaacactatatgtgtatctgttatccaaagtcttattattatactgttctatatatgtttcaagcatcttcgattcaatttcatgccatttgctggtgtcgggtttatactcatttgcaattctgttcaagaggttgttaaacactgaatttaaactttccagagtctgtatatagttatatatcaagctgttatcatcatcttcttccttgtttttcaattctccattagtcaggactgagaaattagaattattggtatgtatgcccttgtaagggttaacataaaaattctgtatgcagtcgtctgtattcgagcgtaatttgaacaagtctagcaagttgtaggtcatgtgatacttttcatctgatatatactgtgatgagaatattgctgtgctagagcccttcaaattcttgcacaaattgcaaaacagcctcggaaaccccagacaccttttacacaaaagcgatcttttactagaaacgaaagtgaaaagaagtggactgtaatccactctgcaagtggtcagatcacacatattgtgataattgagcaaatctgttccatccttgatatcgtcacgttcatcagttttagttttggtactaattcgattttgggatttagtagtgttgtcattacatgaaaacatgtaatcatttccgtttgggggcacattaacatagtttgtattgaaatgttgccaaactggatctgacaacagcccgtgaggatttttaactaatttatcacattttttatattttggtcctaaatcaacacctctcttgaaccttcccttcgactttacaaaccaggtcggatttgggccgcttagtatctgaggtacttcctgatttttcaacaattgtaaacttttaaacgagtctacaaagttatttatggcctcaacctcgtctaatttttgtttatcttccttctccttcttttccttatgatcatccttacccttgtcagctaacttaagtttctctttttccttttctttcctatctgagtctcgcttggaactaactttaggtatatatagtgtcaagtggatggcgtcaggcaatggagatgagtatattgttggaagtcgctggttcgaatcatgcttcgggctcactaagggtttgtaaacgttgtcgttttctaacaacccttgaaactggtcacttgaaagtgacggtgaagaattgaaatatctaaaaatcccatcagtggtagggtttatgatagggttgagcaaggttttctcactacttgagagccgtagtgggaatttaacggagcggaggtgtagtgtattcttttttttcaggttcttttttacagagttttttgatgataaatatttagttatttttgatgagatgtgccttgtatgccatatgtgattctttaggcataaaaccagcgatggatgaggtgcgctaaaatactgcctgtcaaaatcagtccagaatctttcctcttcttgagagggttctttcgtttctaaaaaaacatatttttacaacttagaaatttgaaataggtaaatatattttaaaaatatttatcttgagaaaatattagattttatacataaagtttgttactaacagttggaagtgtcgagcgtttgacacaaaatgaaaattaagaaaaataaaatatttcgaacttacgttggttttcggtactcatatccaaaaatgtagaatcattataaattattggatatttgtacgaattttaggtgattattttacagaacttgctatgagtgcaaattgaccacaatagacaaaatcttcgaggattaagaaggaggtcataaaaacaccaaaaattaaatagttaattggatcaaaatcaaatttatataaacgaaatagagaaaagtgtgcacatattttaaagagattgaaacagatagtccaatgatctccttaaagaacattaaattgagaaaaaatttataaatagcccttaaaatgttaaataaacagttttagaacgttatttattataattttattagtatactcacattaaatgaaatattatacaaagatgtttaaaaatggtaaaaaggaataaagatgtacattaaatttatacaaaaaatgagggggttatatttactattcctttacataagatgactgactaaataacgctccatttcttttgtgattgggtataaaacttcaacccaattaacaacgtcaaaatgtataaagtatgttaaccttttttgtttgaagagatttacaatagaatcttctatgtaattattttagctttagatatggcctttgtgggctattatctatgtgtactattccgtttatgtgtatttgtccatttttcgattttgtataatatttcccactttaaacgcgagtttcgtatgtaaaattttaccatacttcaattgattgttaaatgtattttaaatctgaactttttaatccagtttattttatacacatttaaatgaggagggatatacttcattatgttgccttccatttcaatttttcacgttattttcctccttgtttccctaaaactcatcaaatgctttaaaataaacactcaattagtaaactttcaccaaaataaccaattagttgattttaattacaagtttaaacctaatgtgtatcatgattctcggttgggttctttcgttctcaaccctgatgaatttaaggctatcccgaattatttgcgatatgaaactctaacaaattttatatctgacagggccgaatttgttcagaatttgaagaaaagtttatctcggtataagagtgtgactctcaagacagtgaacaagtttaagcgaaactcactttccaacttccgcaagtgttattctgatctttgggaggagataaagttttggtacttgaagggcagtaacttcagcttctacgatctctttactcttggcgacaatcctgtttaccttcttgtgaagttgaaccttgcactatttatcgtcgatttatttttcaagggtgaactttccaagaatttttccgtcaagggtctgaatcttttttatatgaatgagcactatcgcatcattacttctttattttttcactgggatcttcggcaccttctgtcaaatgtgggtagtttactatctgtgggtaacaacgttcttaagctcttcgggcctagaaatctactcgtcatttactttctttccggcattactgctaattatttcagttatttgtacaattacatttacaaaaatggaatccctgccaaccttttacttcttctgagatcaattggtaagaatttcaccaacgccaccaagcctatagtcttggctacaaacaccattgttgacgatattttacacaagacaaagagaattggttttcctcttttctttttcgattatatcttcacttctgttactatgtctgctgattattgtctcgcaaagcttgctcaggttctcactggcatcactcccagatctctaaacgacgttgatatgaaagttaaggagatttgtatgactaaatctaagaacgacttcaagtcttgtggcgcttctagtagcatcttcggcctctacggtgctctccttacctactacatcaagtctggctatattaacaactattctgtcattaacaacttatttgtttccttcgttgttccttacgttcttaggtcattcactgataagcttgatcacatttctcaccttgtcggcttcattactggctccgttctctccacagttttagagtaatttgtttttattattatacatgctatattatacatggtatatatacttgtttaatcacatatatatttaggaagaatagacggtagtatcatatttaccacatacacagcataatcatatattgataaatattaaaatgttttgatttgtttgattaatcgcactattttattgtattcgtttttagagtacaggtgctccgctattgcgtgttcatggctgaaaatggtcaaaaagttattaaacttctcattatgagtaagattcatttggtcatctacaaatttgtgaaaacaaagtatgtaaagatatataattggggattttacataagtagatgtatatgttggtgaaatatcaatatatatttgttaaatatgaatatataactggaaataatagttttctaaaaagataccgtttaaaatttcattgtctattgacattgatgtggactggatataaatcttaaccctgttgaacaggttctggttaaatttgtagttgatctcttcgaaaaaatccaaaacttcaaatatgatgcagttgtaaaccaagtcaatgcatatgtgaattacacttttggacacctaaaaataaattataatttatataggaaaattgatatagtaaatttaagcaccaaaattgatgtactaaaatatttatggtaaaattgatacactaattgttatatacgaatttgaaacttattttatctagagatacctcattgggtagatattttaggaccaaagacttgaaataagtcaagtattctataatatcagatcctgtggactctgttgaggtgtgttgcaattccaggtgaagcacttggtgtagtaacttttgaacatactgctgtgaaagagctgataggtggactattaaaaaatcttgtaatttaagcagggatatcttgattaaactgatcttgtagctcttcctaaccatctcaatgagtccgtcaagtgaaattgatgtaacattggagtaaacttggtatgaaaattggactaaatatggcaataatgatgccaagtggttaatgtaatatacatttgagatgtataatacaaagactttaagcacttgtttaaggccttgtatatcccgttctactttcgagatattatataaaaagtccttaaatgagctgttggagttaaacacgtaaagcaaaatcacgttctgtattagcttagaattgttttcaatgtactttaacaatatttcattttgtgtcgtgttttctgtttcttgagccatcgagttatgtgataactcgtgtgtcagcatcactggcatcaaaatcacctttattagcagagaaactatgaagaaaaggctgtttgagatgtagcaactttccaacttggtaagaacagacaaattctgtgttatcatcccaacgtctatgtttgttagtcctgccaatctcaaaaattcgttcaggaatgagttgtacaagttcataattgttccgaaatccagagactttataaataacaagtccatatggtcttcgccattcaaagtcaatgaactcagtacgtttgaagatatgtcagaatctgctgactcaattggcgggtactgagtttgtgataaagttctgacattatctaggagttgattttcccaatttcttaatgatatctccaggtatgtttcaaagtaatttattcccccaaacaggttattcttctccaaaacacacttaaaattcccaattatttcaaaagcgtcggaaattggcaacaggagtgaaactacttcacaaaaatccctgaaaaaagcatccactagtttaaagaagatatcatttgaaaactcctcgtcaaaggcgaactggactggctgtattgcagttgaagtatcagtgctgttaaataaatgtgttacgtgctttagaaaagagttaactagtagaagttttcctagtgtaacgtctaccatggatgatatttcagtcttgataagttcattcaaagcttgatcctttaagaagtgtttcaagtggaggccaatgttaaaatcctgacttatggcgtatgccttatccgaaatcgaaggtgggacagtaaattggataaaagacatacaatagctctccaaaatatccacaaaataacccaacaagcccaggttaatgaaacatttgagcagatctgccagcggtacttccttagactctcctgaattaagaagaacaattaatgtagttggtggaggaggtacgtaaaacttctcatttgtattatcagtctcatcttgaaatagttgtgggttatcatataccgtgcttaaaagctggaatgacttgtaggctagaaagtatagtgcctttacgaggatctcaaattttttatagaaatccttgatcatcttatctgccaagtcactgctctcattaactgagacatcctttaagacatttgcatagatctcggcaaagttctgggagcctgaaaccactgaatccaaatacttattactatatgaagtatcagaaaaatattgattgagtgaattagtcaggtaatcatcattcttgtactgagatgcaaacaaactgtaggtattcagtggaattgatgtgtatcggcttgagaaatagttatcattgagtccaaatccaaaggtttcagatagttttttgtatgaattcataaagactcttgagcaatctgcaatgctgaagttttttatgaactcatcaaaatcttcataaaataataataaagtatgaacattttcaatagtcgagcggatagttgcgatattaatcacggaatctccgttcaaaacattatcaatactaagtcccatatttataaaaaagatttaattagaaaattgtggccaaattacgggtaaatgtatgtttctcaaaaatataatatgacaaatgtatggtagggtattaatttcaaacacattgtagtgatccattgtctaaaaataaataatcagatttcacgatttagataaataaaattttgatgaaatttcaaaagattaaagtgatttaatgcaatgtttttacacctctttttgtatccccattctatttctattatcaacatatcccccatggctcatagaaaatcaggtgtatctacctttttatttatatatacttgattttttcagtctgaagacatttttatatacccaccaaacctatataatctatactatttaaaatttcatttggaatcactgggttaaaatgggtgcttacaagtaatgatttattttatcaattaaacataatttaataattctagatcaattttatctttaaaataatattttggaattaatatggtttaggtatttggaagaactatggaggaagaagcagtctgatgtgatgaggaccctccttagaatcaggacttgggaatacagacaacttccagcactccatcgcgtttctagacctacaagacccgataaggccaggagacttggatataaagccaaacaaggctttgtaatatacagagtcagagtaagacgtggtgatcgcaagaaaaacgtcgcaaacggaattgtttacggaaaaccaaagcatcaaggtatccgtaaacagaaatcgaagaggaacttgcgtagcgtagcagaagagagagttggaagacactgtggaggtcttagagttttaaacagctactgggtcggtcaggacgaagtatataagttttacgaagtcgttttagtagatccggctcacaacgctgttagaaacaacccaaggttgaactatctctgcaaaccagtacataaacacagggaaatgagaggcttgacttctgcaggaaagaaataccgtggccttcgtgtcaagggaccaagagcttccaagtctaggccttctgttagagccaattggagaagaagacaacttcaacttttatggagaaaaagataattgaacattaatttcatttccacaatatcatacacattatcccaatcgttacagtttcttcttatattttttatacataatgtgtaatttatttattatattttataataattaagttattttaagatttagtgtttaaaatagataatttggtttttatatggtgttcgaaaacaacagttaccagaatgtcagttttttaaattattttaaaccaattttgtattgttttaacaaatgactaattttaatgtaactcaagtggaagctattttaatcttgggagaaaatggtgaaaaaatcgcagtaagatattacaaattacatccctcaagcaaatgtatgttaattccgcatcaaaaataattaatacataatcataagtatttattaatgctatataataattttttatttttatctcactgatattttagtatcaatctctgaagaggaccaaaaggtatttgaaaagagtctagttgaccagctgaaacaagccaaaagctcaggtattaaatatatatgatttttaaattatatcaactatattgaatataatttgtatgcagagattcatcatgactgtcttctgattgagaaccacttggttgtgtttacaattgtagctgatgtgttcattgcagtagtgggacatttgactgaaaatgaactaatattgtcccaattgtgtacaaatgttgagaaagtactagaatacctaaccaagtatcttttatatctatatgctattgttatattcgactctaacaatggatttttcagctacgatatcaaaaaggactttgtatatgaaaaactagcatcagtatttctattattggatgatgttgttgacggagggtgagtaatcttgaatttaattatggtttagaataattatggaaactgaacatgaagttattatcaagaggcttaaaagaaaagaaaatgactcttctgatcatgtgccagtcaaacaggtaattttgtactaataattaatcaaataggcaattcataatgtgaggaacaacgtgatcatgacactactcaattcataaccaattttaatatattctaacatgttttacacattaaatattttcagttttacaaactttttatcaaggtttacaaagttccaggcccgtaactttggaacaaaaagagttacacagagaagaagtaatccattttaacacattaaacgtgaaaatattggatttatatatattatacaattattataaaattaatttaacattgttttaggatttatgctgagaattattaggcctgaagagaagtttactgataaaaccatgaccaatggactttttgacaaaaatgactgccttcctaaatccttgcttaaaagtccagtaattagaaagcttatctatgcgaatactgctgaatctatggagcttgcttcaacaattaattgggatgtttacaagtgtaacgttaagggtgtaaggtaacatacacactaattcataacacattctgttttatattatatatataaatttggaataactaatggttataaaggtggcatccgagcgggagctggatggtacaattttcaaaaagaaactacgagaataacttcttcgtaaactgcaaggcttatttcaggtatcttctatataaaatatttttaatttaatataattaaatctgatgaataaatcagggtggagaaacatgggttttttgaagccaaaaggctcgctatcgcatacagaaagagactggaattcgaatactctcagctggaaaaaacatgggaaattatagaaaagtaagacttatctggaaataaaattataaataattgtaggaaacgagaaatggaaagaatggaaaagaataaagctaaagaaataaagggaattgaagatcaatttctcttatcagataatttaaattcttttgaaatttaaattttgtaaaagtagattctccaaaatgtttaataatgttctggagtgttgaatgttatactggttcagtagtgccacacatattaatcatttattgtagttattaatgtaattgtttaaatgtttttcaatatttacaacaaattattaacaaatacctcgaattttaactcattagagacaagttcgtgaaatttaaagctagataaataattttttaggattcttttctaaatgtttaaatttaacctcaagaaacctctctactactgttaaccgacagaattcaaatgaatttgatgtgttcatagtcggaggagggaccaccggcacctccctcttctacactttttcaaaattcacaagttagtttaactctttacgtctatcattaatttaattaatcctttagatttgaaaaggatcgcactgtgtgagagaaggtccggatacgctctttcagcatcatatcctaaaaataacagccaaactatacattgcggtaaaaatttaatttatcatattatttaggagatattgaaagcaattacacctctgaatcagccagaaaagtaaagagagccgcagatattttgaggaattacttaactaaattaccaaaagatgatttggataggtaaatttcttgaactaatccgtacaatcaaatacatattatattatattatcacgcataacataatgtttagcattgcaaaagagggtcagaagatgttaattggggttggagatgtggaatgcgaatttgtagaaaagagatttaagccttttaaagaaattttcccaacaatggaatatttaactaaggatcaggtttgttattacacaatataacttaatgtgtagattgcaaaagccgaaccaaatgttatttataaaaagaacggcgagcctagacctgaggatgttaacgctctttacgtggagaatgaactcacaacgataaactttctaaaactggcagaaatgtttatcaaaacagcagagaatccagataaggatctggtgactatgatgaacacagaagtaaagaacgttgagaggctagaaaatggctttaaagtgaataccaataatggagagtttttttcaaagtttgtaatttttggtacttgtggatactcactcctgtttgcacataaaatgggctttggactacagtacagtgttcttccagtggctggaagtttttacttttcaaaggacatcttgaagggcaaagtgtacaccgttcagaaccctttgttaccttttgccgcaattcatggagatccggacattgtggctgaaaaccagaccagacttgggccgacagccttgccacttcccctcctcgagaggtataatctggcaagctttcctgactttttgagagtattcaaactagatcatagagtattgttggtctactttgatctttttaaacagagtactataaggaactatgtccttaaaaactttttgtttgaagttcccctcctttctaggtggctttttcttagggatgcgagaaaaattgttccctcactgaactactctgacattgtatattctcagggctacggaggcgtgagaccacaactagttgataaaaagaacagaaaactcctcttcggtgagagtaaaataaggtctggagacggtctgattttcaacatttccccctctccaggtgctacaacttgtctttcaaatgcagtcggtgatgcaagggaggtttgtgagtttcttggtgcaactctatatgaagaccaggtcaaaaagcttttactagaaggcgaatatgaagttacaacctagattttaatttaattttcaatttaaatttcctttatatagtatatactatgatgtgtacacatttgtatatacaaagtactttatgtatagtatagtacattaggattttattagtttagagtaactttcattagtcattggtattgaaagagcgttgaaaatctctgaatttgatccagaagaccattcagattcacaaaaacgttgaaatgtcaacttcacaattgatgtgttcttggtcctaatctgaaggagtctagaaatgggtaaagttagaaagttaaaatttaagactacaaaggcgtcaattggtgattcaaagtctaaaagcggtaatagcttgtttaagaaaaaatcgtccacaaccatagttgaaagagtggtaccagagagtatatctgagaaacacatcaagttaccaataaggttcaagcatgagaacttgataatgtgtaaacccacaggatcactaatcattgatagcatgaatgaagaatccttggtatttagcctgaaactgaccactgagaccttggtgtttatagattttatcaaggaggttgtgattttctaaaaaataatgtaaaaataattaaattacctcaacattatttgacttgttatcctgactagaattttgcattacaaattttaacaattcacacaaattttgacattgttcgtatgactcaatatcgaagtattctatgcagttcatggagaggaggaaaagaacctaaataacagtcaataataaataaacagtattagttaaaaattacctcgtcaactactagtggtaacatattttgatcaaattttaacaaaacgttgaaccattcaagtgatttgatatcaaattgatttagtgggtcccaagtcagcagtgaaaccttaacaaaaaataaaattacatttttaagattttctgctacatttaaagcttcatattcacttggattagtttctttaaaacttaaaaatggttctaaacaggcactgattgtgcaaaactcctctgtaacatcactcatcaaattcaaatccacttgttccaagttaatttcatactcgtataactctgatagctgtggaaatgtataattaacgcccaatttgacagtgaataaatccctaaccctagttgtaagatattcttttaaagaactggatttaaattttggagcatgtttcacactattattaacaagatcactttttatttcattaaggccatctaatctcttatcaaagttcttttcaatagtttgcgataaatcctttcccatctcatcaatatcctccaattctccacaattgtactctaagttactaactcctgagagtcgaagaaaatcacagtataaccaccttctcatccttaacagatactccatctcctcaattctgttctttttaattttgtccagagtaacaaggagtgtgtgtagctttgaacttaccaaactcgacagtgtatttgaagtttccaggagattggaataaaccgttaaatggttttcaaggtgagatttctctgtctctaactttgttatcttatctatgttttggctcaacaaagcctggttagattctaggtttctctttaaaatttgtagctcagactcggcggtatcaacaatttgcgataattctaactcaatgtcaaaatctgactccacttctgataactcataaaggggaacatcataatagtcaaattcaacatcattatcagctggattggaaaccttttcatcactgcgttcttcatccatattatcatcagactcctctgtagattcaatttcatccacaaagttagtctcgatatccatattatattcgtcagattcttcgtcactatcaaattctgaaccatctgactctttagtatcctcaggatcttttttctgatcttcaccagttgaatcagtatctttttgaaatgttttggtattatgagttggaaaatgatatttatcagtggttgaaggttcagatttcttggaatttgataaatcaatgccttttttaaatcttttcttaacaaaagggttagtcattttggcatttctcaggtgtatgttgctaaactcatcctcaactaatgaatctgtaaaacttaaattgtttatgacctttttttgtgtgttcaaaggtcgattttgggctaaatccactttatttgttatagtaccatctcgtaatcctcttctgaaactcacaccggaatctttaactgaaaaattagatgaatcatcttgttttaacaactcggtatccactgaatctgtttctgaaatgttattatcatctactgtgttataattatcagattcgtgtgaaaaatcagaaggtttctttctaactagagaagatctttttagaaacatattttacaaattttttaaatataatacatcatgtttaggtataaatgataaataaataaataataaataaaataaagtgatttgaagtgtaacagcaggagaagaaagaaaatattaatttccccaataatttcatattttattccatgttcaaaagtgtatctgaaaaaataatattattaatattaataaattctggaattttctcaaaaagtgtactttcttggtgtatgtgttaatgattccccatgtatataaaattattataattttaaaagggttgttgtcgtatattttgtataaacgtaaattataattatattatcttcatttctgtttcattaaatacagtttcaacatcagaaaatgtaaaattaatatttaatggtgtatcataccaaattttccttataatttagtttaaaatggtattttcaaatttgatcagcttaaattatccttttagattagaatttcagctagaagacttgccggaggagccgccaagccacactggggagagcctccaaagcatagatggcagcctttcctactagatcgtacacattatggagaacatcccacgtataatggatttgtgctacttttacgttatttaagaccgagaattgagaaggttttctcctcgactttctcaactctgtcctccttatcactttctttatataatcccgttaaaagactagtcttaaaacacaaccctgatataagatacgtaagtggttgtcaaatttattcatttttcatcattttatattaatttttataaaaatctttagcaatttgttgctcttacctcgttttttttaaccacaagagctattaccacttattacggaaatgtgtaccaaggcattgttgtaagtttaacttagtttttaaattcctcaggaccttggaaacatgttaatgctgggaacagctgatgatttgaatgagcagggcttctggaactcaaatttggaggacaggaaggaaagagagaaatacttcgagaaggagcaggaccgtctgaacaagttgtgggaaagagctcttgaaaaggccacagtcagtgagagctttgaagatctttgctcacttgtagttccaaaatcatatgaagttccaacaggagtagtacctccagtttcatgtaactcatctctacacagttagaattatgagcactaattatttccataattttttaacaatttcatttgtggttcagggagatttaacatgattcagtatggaaaggataacgaagatagtcatacatttgacactccttcccatgaacaacccttgagatctcttgcacttaacttcacgtataataacctctccggggactggggagattacattaataggcaggataataaaggacctctaatgagacctgccaggcaaatgttcacagatattttcatccccggcactaaataatgtagattcaacttttacatttgatagtagtgagcagttttatatatattggtgatactgttaatatatagtgtttgtgaaatatattgagaggtaggttacagaaattgtgactattgtacatcgatagaatttaaaatagtgttaaaagtgtgttggactacatgttatgttggttttctatgatgccagagatgaagtcgtgaacagttctgttattcgagtagagatagttttcaatggcgtaatgaacccaaggctaaaaacagttataaaaataatggttacctccatgtattgttgtctttgttccagtttcttatgagtaaagggtttgatgttcttaaactccttgttatcaataaagtttgtaataaactaaaaaattatatatatatatatatacttgagtaaataaaataaaataataaatatatttaagtaaagaaataagcaaataggtgaaagggggtgaaatacctttttaggatcaagtgagaagctggaatacaaattcctgaggtgaactagctcaataacctcattttcggcagaactaatttgagaatcaagttcactttgtttttcgtcttttctgactggatttggggaagatgactctagggttaaatcgtaaagagtctcgttgtcttctggactaccactaagttttacttggtgggttagtttaacaggccttgcaggaaacaagtgctccctaagaagggctggaacctcagagattttcacgtgttcagcgtctgttgagaaaagtccctttagaacttcatcaagtgttaagagaacttcttcgccctccttttcaacgaataacttattcttaaacccgtaagaccatatggactttgttatcgtaggtaaatttaccttcattaggtcagtattaagttcaccttcgtcgaggttgtagtaaatgaactcatacaaattctgtgaaacagagtacactgggatgctttgacgcgggaaaaggtaaacctggatttcacattcctcaaacccaagcctattcacgtgtaactcatcaaaaccgttataatttggctggataaactctggattgctattcgggttatcctggttatctggctgagagtcactaagattagtctgattggctatggctgtggcaaaatcaaattttggtgatagcattttaactgaggatatgcttttgttagtctttattctgttttgattataaagagtttccttttcctctatcatcaagtccctgttccataaaactatccccgaaggcgtgtcaatcattatattgttgaagtactttgtcaagggggcgtcaatttcatcctcttcgccattttcgtcattttcaaggtctgatgctttgatgtaaatggtataccttgaaggcgggacgttcgagtaggagaagtttgggggccttttatcctggtcttcgtacgtgttgtaaattttaactctgaccttaattggcttggaagtagggtcgtagagtttacaattttgctgttgttgtataagtttatcgagatgtttttcgatactggagagtttttgtagaaattgtgattcctcaggatgtgtttcctttaggtgatccaagtttaaatcagacatctactgaggttaatattgtacattaaattactaaaacaatttatttacacaattttgagaataaactacaatatacaatatgatttttgcaaatgtgctacccataccactactccgttatctacacaacactaataaactaaattaaataaatttaccaaatgtgataaattaactaaatttaatgtatttaatcaaatagcagggctaaatttaaagaagattagtaaattaatgataaaatctcaagtatacagtcgtagtatggaatcgaggttcaacaggcttgttaaaagtgtcgtaaaaagtgttctatgtgtgtagttatactgctttacgaatgatggaacttgctccaactggcgtggatttaaaaattccactgagtttactctcggttgtgacggtactgaacctccgtttgctgtacataccttagccaatttttcaattactcttctaatttcttccggattttccaacttcagcgctgttcctgggttaaatacactaacttcaggtgcattttcattcaatccaaccgcgtttggtagactcactagtgataaaatatactctagcaaaatcacacagcagtccaaagttacaatcttcaacgtcagcattccgctcaatctctcatccagccctaaaaatagttcaccagcgtgattgtatccattaaaagtgtaaactgggtgaatgtcgtttactccattaacgttattaaatccattaatcttattcatttggttaaaagagtccagattacttgttaaaaatgagctagtggtgtaattaacgtaggtggagtagtagtggaggaatttcaaaaactgttctgaacacttgagcattacttggaatagtagtttaaccagttctaacgctctcgttttaattggcacatgagatgtgaaatttaaattcatttcaaaagctcccagttcggggaagaacgtttgtaggcataaaagcactgcaagccagtttaggcttgagtctaaatgacttgaaaaaagagttagaagacttggtaccagctttggcaatgaagatgctagtggaaacttacagtgtacatctgccagtattaatgagaagttatccttgtatctgttaagtgctctataatctgacaacagccataagaacgttatcctgtatactcttagcagacaacaaatgtaaactgttccttcatcctggtcattatcactctgagtttgatcatccaattccaatttagtatcttggtttaatagtgaacttgtatgtgatagcaatagatcagaatactgatttagccatgtgatgatagcgttcctagtcttaattgacgtagtcgataacaaatgctccaggatgaacatggttggtagaagtaaccctgtggtcgctttattagtgaatactgataaaaatgtacacttgaggaacatgtcagagagattttcgtgttcgttaaccttaatgctgaaccaaaatgagctaaattggtgtagtgtgcagacactgtgaagcacgtgtagtgttcccattaaaagctcagtgcaaagggtacatggtgtgttcaacaaacattcattacacaggtaaaagttaaccataagcctgttcgtcaccaactctttcaaattctcaacactgatttctcctactagtccatattccaaagtccctgtgtcaaactctactttattagcttcaaatgttcctaatcccctaattagtgatgataacagcttcagtgcctctactgtacaatttgggttcttcttctccaatgaaaagtataaactctcaatgcatctaaacctataatacttcatatcttcttccaaattttctgaatccatatccgtatccacctggttcatgttctgagatgaatcaagttccatcccattcctataatccacttcagctccattattcacttttactgatttataacctgtgaaaatatgtcccaaaacttcaatatcatggtaaactggataattccttgttgaatcctcaaataacattttcaaaatcgtgtttttattactctggtgtgataaatgtgatatcaacatcctcattatcatattatctccttccctgacaaacttattcatgctcccaaaactcccaccacttctattatgcatattttcaaatgaaggactatgtttaacattcttataaacactgtcaaatgatgttatggtgatgaagtagtttatcacgttgtaaatctttgccttcagaatcgggtggctgttatcagtttgcaacaagtagtttacaagctgtatcaggacgttgacaaccacgttaaaatccttatttgcatataatctcttcactacactcagttgtaacatgaacttaatctcataatctcgttcacgaccctccatgtagtcaaaaacaacgtcaaactttagcatttccagcctttcatacatcttaagcatcttttcaaacagaaatgaaaatgcaatcatgtaactgttatacatctccaccaacgtcgagtactcttcataaacatcgtcttcaggtgaattttgcgatagtaacctaatcaccaaattgttgttgtgaattgggtaagaattgatattccaaaccctcttcaaactcttactatcaaatttccctatgcgatcaaccagattttcatacaaaactgtctcatattcacagaagttatcaatcacgttgtgtaccaaacctgtgtaatccaaatctactcgctccaataaacttaatatttccacattctccttttggtcttgttccattgttctttcattacttccgtaatcctccaaactttcgtaatcctttaaacttccgtaattatccaataaaccatgtttaacattctctccgtatgaaaaactcgtatctcgctctggatttgtggtgtgtattttattcaaaacactcgagtatgtagttacaatctccaccatatacgccagtttatagtactgtatgacgttgtagttgtagttatttctttcaaatttgatgttgtttgtatcctcaaatattgatgaccaggtcagcagtaatagtttggagtaatgcgttttggaaaccaggtttagtatgattgagagcatatacaccttgtgccagctgttttcctcccaatcctgtctgcatgccttcaccatattcaaaaagagtctatcatcaaccaccttaagttgtatttctgggtttagggaaaagaagtacgtcaccatggccttgaatgtacacgtgttcatctgtctgaggtttgaaaatgaagaaatctggtcaaaatccacgtgaactaaccttctcagcttgttatacagcattaaatcttccgtttccatatcaacatcattgatcacatagtaaaattccctgtctctagaatccccaaagttgccagtgctgtacaaatcaaaagtcgccttattcaaataacacttgaaccttgtgagcaacttattgttcaaataaagactacaattcctattcacaaactggagtaaaatgtacaaggtcttgatcctcaactcagtatctcttgtagacaagtttcccacgaaatcacacttcaaatccggtgaataagctgataaagcatccagaaacgcctcgtgtgccatcaatagtgacagtggcctctgattaaaatccacgttatgacatacatcacagcctgatctcttctgaatactcttaacctgatatcttacatcgccattaccctgtagaagttgtattttattcaaaaaccatgtgaactttttggtgcttctcttctctacatttttatgtactagttggtcttgtccacatgtagaattacagtttggacacttattttccaggttaaactttgaaattttgtgcagtgacatcactatgaaatcccttttaaacacgttacatactaaagatactgctgttgtcaacttagcctctgttgcacactttactagcaaataggtcactgagcttcccgggagtaaaatctgttcatacaaatactgagttgctttcgacttatttaacagccccagaggtcctttggaaactattagcatgaagttgaacacgttgtctagcattgcgtaataatctagttcagggtaatttgtaacttcactcagcgtatcaatcactagcgtatactgaccgtgacttctcttagtcccactttcaagtgaacctcgctttccgaacatcttcttatctcccttgtatgtatttgaaatcacagtatccaacatcaaaagagtgtattttatcaactcaaacaaataatcgtaatcctcgtatattgagtacctatcctgaaagggcaagtatagtgtcagagctgtaaggcagtacatcaaattggataactcatagtagttaagcgtcctactaagtgtacttgaaggttcttggagtaattgtgttagtttaaccaatgacagtttacaggatttatggtctgttacatgtactgatgctatgctcctcaataaacttccaaccaaaagctcagtcccatctatgtacggatttgaaagtatactaaagagtacatccaaatacgtatgatttccaaactttacatttagtctattttccgtctcaactcctttcatcatcttcttacccttattattattattttcaccactcaaatcatcacttttaccttttactaactgcattctgaggtttaagtctgagcttgacaacagtgggtctagtgttactaccagcttaaaaatcagtgaggatacttcaactagtccaaatggaattgatgttcccaatcccaggttactcaaagctttctttacctcctttgttgtgtttactagtggaaacgtgtataaccttctagagtacattctatgttcactcttaatccctttataaatatcttcctcctcctgttttaaacccttaattctataattttcaacatccttcaagtaatcatctttatacttgactgtattagagccaactagatattttgatgggtttagggaactagggttatgtggtgatttaaaataatccttcagataagctgtggtatcctcgaaggtaggagagtaaactgaactcatattttcatttggtactgttgtgttaatctttagagttgcttctgcactttctattcgatcatctcttgctattatctgctgatatataagatcatatagcagatcgaaatcccctctgtttaaactcctcagctgggttaccactctctgtagaagatacggaaactgcatatcagtacaaaacccagaattcagaaaggttacaagttggtctgaaacctttggaaaacctgctaagaacactgaaaactccaagagaacgatcatcagtttaggataagtctccacaaagatgtttctgttattacatgccgatgaaaccagctctaatagtgcactgttcctatcatgccagctaaagcctctgtttggaaataataacaagtggtccaaatccttagaattcaaagttatcatatccttactactgggattatctgatttatataggtgctcatgctgagatttgtaatatatcttattatagggattaaaattttgggtcaaagtttggaatggtatctgactctgtacttgaccaggtagtaagttaggatatcctctgaaatccatcggtttattatctgtcagggatgatttcactatgaagtaatcatagttataatttgcgttattatgtgtgaacaggagtgaagttctgtctgggattaggcacttgtaagactcaactatgctctggtacaccttaaacagaaattctgagtctctttcagtataaatctttgaaaatagctgcagcaaatttatcaaagtagttccaggctctctaaaaatcgctgcgttaatctcatcttcaaccacttgtcttgataactcctccaatttacgtttacacatgatttcgtagtttatcaggtcataccaagtcttactcaggccttcgccctgtttgaaaagattagagaatagaaacttcaacaactttgtatacactggtaggtatcctatatcaaacttttccttgttttcaagaaattgctcatatactttaagaaatatccgtagcacgttactgctgaggccttccagtatcttctccttatccttaaaatatactccgtaaagtacaaaatcaatcaccaactcaacatctgagtacaattctctagtttcctcaagatccttcaacttctttgaatcaaatctttcaaatttaagcttgtcctcaacttcctcagctttagggtcaccggccttcatatttgaacccactttaaaatcgggtgtagtttctgttttcaaattattctgatcaagagaacctctatagaacaagggatgaggatcttttttgaagattttgagagtgctttcatcgaaataggacatgttaaggttctggtctattctcttaatatttgtattcaccatgatcatgagtaagttacacaatttccacgtcaacttgttatctgtgagcttatcaaaatcccttgttgttatccaaaccatgactgacctgggtgatttaggataaaatgcactaatatcatcccctgtatagttttcaaacagcatcaaaagactatttccaaactctgggaagttaaacatcctcgtgaagtcaaatacgtgaggcaaaaatgaaaccaaatacttcaaatcactttccattggtgagaaaaccgtataatatgatgacaataactcaaacagagtattcaagtataatgaattatgcttaaacacaaggtcgtagtccagtttatcacggctaataggatctctactaatactgagatggtactctggtgcatttcctgatttatactcataaaatctgtttgtttcatcaattgtggacagaagtaatatgaacaagttcctaactaagcctctatcggtcaggttttttaaaatatcaatggcttctggaaacacttcgtctggctcaaacttatcgtccgtcaaatattctccattatttacaaagtagaatagtgatatgatactcctgagttggaatagtgtttgtctgaagagcatgttctctattattgtaaactctggcatgtgctgactgtcgttaactccatagtagaacaacccttcgtacaacaactcacagcatagaaactgatccacattacatattttactgaaatcctcaatcttatccagattttcaagcaaatccttgaaccttgagcttacatattgtgtaagctgctctttagtaacatataatcttcttttgggtactagtcttggcctgtgaaaatcacttttagtcatacaatcaactattgctgtttttaaggtggacaaattagtctttaaattaacatctttgcttggatcacacaaatcctcaaagtcctcatcttcagattccgtcaactcatcgtcggattcattctccttcaatacactagaatcatcctttactaaatgttttggtaaacatttgttccagaatttatggaaaaatccgagtttataacttccatcccgtgatttactccttggcccttttctttttgaaaatttcctcaaatgcttcaaacatgagtaaaccagttcataatttccgttacaccactgaagagcgttttcatctagggtaatggcagtatccatatcctagaagatgcgagggcacctgtttccaaaaacctagagaattaacggtggcgttgtgtaaaataaaatgaacattatataaattttacaatttttaaactccgagaaattatgaaaaagatttacatgaactttcctaatacactgttgtttgtgaatctatgataaataatctgcgataaggtacacaattaaatcatactaagttaaaaaataaaaacaaggttataaactgcatataattaaaattattccatatattcactaaatttaaccagaatttgcctatactccccacccgaacatatataacacataacatggaggtattatattttatttaccattgtaaagaagctatatttgcattaaaatttattacgcttaagattttgagtacaaatgtatcaagggcattggaacactcttgataatctttttaatattttctttagaaataataacatgagcttcacaaccgattggtgtatatacagttacctataatcttagttaacctttacttaaacttactcctactagtatcattacacatcctggcatcatttcatttacataagaatctatatcttctctatacagaattcctgtgattttatcacattggtcctagaaattggttatatatggtgatacataacttacagtgagtatgattagaatgttaggctccaaaatgacaaatgaatcaatcattacaacaagacaatccgtctatgacataactatattggtgttaaaattaccttgaatgctcttttagtttgtgttttaattaatttatctatattgtactttctggatagaaaatctccaaattgctcacaataatcataatcaatatacatactcacatcaacatctaaatataataatgtgcttgaattcttaccttcaggggatattaagctaattccattaatccaacattctgctttgtatgcctctaaattttccttttcagtagcggaatcttcaaatctattggaaatatgaagttacaattggtaaagtggagaaaataagtacaactgtgtatataaattactgttcctcgatgtagtaatattgtcctattgatcctgctgggcctagtaattggcctgagatatttggagaagaatcaccggcagaagaactaaaacatatatgtgtgaatagtgtttaaataccttgaaagtttagaaactggtgtaaagactgtatcttcctgtactttaacctttttatacccaaaattattgtactctggttgagaacacctcttgaatggttggtttggatccaagcagcttaaaattggtagtatttctgagaaaattgaatcatctaattcatcttccatctcctgacccatatttgaccaaacagaaaaacgctagggttacttttacaacaaatttcattaaaattttgaatttataaggataaaataaggataacaacaatttaagctattagtgtgtagcatcatttaaaacaacatcatactaaaatttttataaaattacatcgagggaatattttatttaattgccctcatttaaaaacaattttaaacatttacaaaacacataaaacaaattataaaataattaaagtgattcagctagaagtggtggaagataaaattaggaacaattaacactcaaaatgagtatttaacacataaatacaactagaaataacataaactaatcaaagatttatactaaaatgctattgtaaacattggtattaagctatataatgcagaaaatatgtgactaaaaagtgagtaaaataatggatcaagttgtattttaaacatatgatcactatgaaaaaattttttaaaatcattcaaatgtgttatattatggtttatatttgttttaatgccatattttcaaatggatggggtcatggcagtatctactgtggactttaatcctaatttagttaaaaatacatattatttgtcaattacaatatttaaaattaattattctattttaaattaattttataatattttagttgttttatcgcatctttgatctcctatagtacttgttttaaaataaagatgaatattatcgtgtcaaagtttcttgctagtacttgtttgtttggctctgccatacttggttgtttcattccttcaattatacgaaaaactataaaaaatgaaggttccgaaccccaaacttctaaaaaagaaggaatcatgtgtctctgtaattgccttgccgcaggtaattctcacaccacctcaattacatagctatttattatagttataaacccatattatatagttataaacccatattatatagttataaaattatatagttatattgtgttgatgggattgacttaggttttataatgggtatgacgtttttgcatatgtttccagagactgctgagcaatgttcttcgagtggactgttcataaagattaaggaaaataagttaaatttaacatttgtcataatgctttcgtcattttcaatcatgttgtttttagagcgtgttttatcctttggaagttagtttatcccattatccatcaatgtatatttagggacaccttgttgttctgtgtttaatgattgtaaggataacacaaagtgttgtgtaccaattgatgaggaatcgcttgttaattgtggaattaaaactgaggaggccattattaaccagtcagaccacgccattaaaccttgtccttctcccagatataaacataaacataatcaaatccttgcaactatcaaaaatcttctctgtcccatctgtgactgtaatggactctgcattacacttgcactcttcttacattcagttttcgaaggtaattttaaattaacctactacaatagtttataatatgtataatataatgttggtttaggactggttgttggacttgaggatcatgatgttcatatgtggttgattactgtggctatagtattgcataagtgggctgctggcatggcgttagcttcatttttagttggtaacactaagactactacgtatgccatgtttgctattttttgtctggggtctcctcttggtgttctaattggttcactcattttggactctaacctgaaggtaatcgcagttttaaacgctatcgctcttggtactcttgtttatgtcggatttgagattatcgtccatgaacttttctgtgaaatcaagtgtaagagaactgctctctacaagtggatctccttcatgctcggcatcacgctcatcttctcaactctaatcctggaatttttcttatcaaatcatgatcactaatataaagtattcccgtgttattctgtactcactatatactatatacttactactcagtactcagtacatactatatactatactacatactcagtactcattacaaaatacaaactttatgattatattttaatttggtgtgattgaaatttattttacatgtggttatagtttggcttcattgagttgtgccattttaccttggctgataaacgatttgacaaattcgagtattttggggcatgatttagtgtgtggtgaattcttcattaaatcatccacctctgacaacggaaccttctttatatacagtacctcacccttctgaggcgttaactcctccgccgtaccattaaacaatgcgacctaacaatcgttctagtttaatagatataaggggttattctagttgaatagatataaggggttattctagttgaatagatataagagtttagtcatgagttgagttattattaaatagttgtataattgtataaagaggaataagttgatacaaagactttgtaatgacatttgacttgatcatcatctctggggaaataaccgacttcaattagattatcttcctgtaaaggtaatccacattcctcatacacctctcttattgcattttccatatatgtttcgccaacctattaattattagttaatattgataggaaaattggtaagttaagtttgataacgaaattgttaagttaagtttgataggaaaattggtgagtaaggttagataccgaaacgacaccgccgaaggctaagtctacaaaaccggggcagtattctttggcaagatctcgaatatgatagaataagtgtggatcatcgggatttgataaaattacaacggaggatatacgatgccactcattatacaatctctaaaaacacattttctctccatttggacaaaataatccctttacatcaacaaactaactaatataatatatttgtataataaaatatgatatgtgggagttgattggttgtattgttggataccatttcttttctggtacaggagccgacttcgttatcgtctttatcgaccatgcagatgacttctgtggagtttggcatggaatctattttagttttatcgatcatgttcgaaaataaatcgatatgataggaaataaacataaaataatcaattttgaggatatgtctcacgatgttcttatggggaacatgtgtacagaaaaattaatagattaattattttaatcacattttttacctccaaactaattacagtttttatcttctacctggattccactataaaacaccatctcacactatttcacactccttacaccacttttacacattcacacattataaactagatttataccatttattaaattgaataatttaatatttagaatatacaaaagtgaaatttttttacactaggattttatccaaattacctcaaatgtgtacactaatcccatacacaatacctactacttataaatatactacaccttctacactacttatacatactacatatatcataaaaaaatttacaatattaaattattatttattgttggtaaaaaaggccccgagcatctaccaagaaaactcagtaaatactcgaggccgcaaatgagtgttgtagatagttgagagagagaaggtgtatgagtgtaaactcctaacatcaaactgtaaactcgtgacaacaaaataatacatagttggtaaaaattgaccaactgtgtgagtgattttgtaaaatacaccagacccagtcagtaaataagagttgactgtgtcaatatttgcttccctttcgacctcactccgtaactgcacactcacaacaagttgttcgtgtgtctactcgtgacaacgtggaatgttgtacacatcgagcacctcgggtagaatctcagcggatcgtaagacaagcctactctcgcgcttacaatacccgggtgcgtcaaggtcgtctgcgatggatgtatcactttgggcgggagaaattgtgttgacggcagagccgtgggaactgcaggcatatagcgttgcgaaagcgccaaaagtgatggaaaacgttgatgttcagcatggattctgacttagaggcgttcagtcattatccaacggatggtagcttcgcggcactagcttttcaactagccgcattaaccaagtatccgaaccaactgttcctctcgtactaaattggattactgtcacaacgtcggtgcatcagtagggtaaaactaacctgtctcacgacggtctaaacccagctcacgttccctattagcgggtgaacaatccgacactttgagacttctgcatctcaatgataggaagagccgacatcgaaggatcaaaaagcaacgtcgctatgaacgcttggctgccacaagccagttatccctgtggtaacttttctgacacctctagctgtatatcttacagactcaaaggatcgataggccatgctttcacagtttgtatttgtactgaaaatcaaaatcaagcgaacttttccccttttggtcaacatgagatttctgtcctcattgagttcgccttgggacacctgtgttatcttttaacagatgtaccgccccagccaaactccccacctggctatgtcttccgcgttaatcagcagagccttgtgcaaaaacatggcgaagccaagtcttaatactacggaataagtaaaacaacatcaagagtagtggtatttcactgtcgccggagctcccacttatcctacacccctcaagtcgtttcacaaagccggactagagtgaagctcaacagggtcttctttccccgctgattttgccaagcccgttcccttggctgtggtttcgctagatgatagatagggacagtgggaatctcgttaatccattcatgcgcgtcactaattagatgacgaggcatttggctaccttaagagagtcatagttactcccgccgtttacccgcgcttggttgaatttcatcactttgacattcagagcactgggcagaaatcacattgcgtcaacaccttttcaagccatcgcaatgctatgttttaattaaacagtcggattccccttgtccgctccagttctgagttagccgttcactacagctgggaaggcgagccaaccctcggcaaataccagagcgcccatgcaagtccggaaaccctcacgggcaaccagccaaacaaaggcgctcaggaaacgccaagggccccatgctgcccggccctcagagccaatccttgtcccgaagttacggatccattttgccgacttcccttatctaccttattctatcgaccagaggctgctaaccttggagacctgatgcggatataggtacggacgggggtgcgaataacaatgttcccttcccttttcacggacagtcgtgggcgcaccagacaccccgaaagtcgagatgctattccagcacagagtccctatcgccagataagctgattccagggcactcgagactgttaaaaagcaaagataacgcttcccgggacccacgcctgcgtcgagaagttcacttgtgttgccacccagtatccacgacccggctcgggaatattagcccgattccctttcgcggagcggaccaaagtcacctcacacgcagttaagctggcgcttaggaccggctaacccatgtccaaacatagttcacatggaaccctgctccacttcagtcttcaaaattctcatttgaatattaactactaccgccaagatcggcactaggcgccgctccatgtgggctcacgcgccacacttcgccgcaacgcccacgtcttcctacacattgtcaccgagaatctgcgacaatggccgggtttcggtaacctgcttgagcgccatccattttcagggccagttcattcggcaggtgagttgttacacactccttagcggatttcgacttccatgaccaccgtcctgctgtctatatgaaccaacaccttttatggtatctgatgagcaggtatttaggcaccttaacccagcgttaggtgcatccctcatcgccattattgcttaccaaaaatggcccactaagaattcacattcaacccgaatgttcagttaagcaacagacggggtcttacccatttaaagtttgagaataggtcaacaggcacagcccaccgatacctctaatcattagctttacctggtaaaactgagacagtgctacgcaccatgaattccagctatcctgagagaaacttcggaagaaaccagctactagatggttcgattagtctttcgcccctatacccaggtttgacgaacgatttgcacgtcagtatcgcggcggacctccatcaggctttcgcctgacttcatcctacccaggcatagttcaccatctttcgggtcctaacaaccatgctcctgcgcaatccacccaaaggcgaccggccgcatgtgaattgagacgacaaagtcccaaggccatgctttcactttcatttcgcgtacgggtttgccacccaaacacttgcacgagtgttagactccttggctcgtgtttcaagacgagtcagttggaacatgtactccagacagcgaggctccagtcggagcatacccaaatgtaatagggtatttacatcggggagaggctgtagagtctggaatctgctagtcacactagagatggcacgactgtgtttagcgacaccccaatgcacgctggctgaaccaaagggattactcagaccatgccaggataattatccgggacaggactgtggcacccagtggaagcgtacgtcccaattggttccctttcagcagtttcaggtacttttaacactcttttcaaagttcttttcacctttccctcacggtacttgttcgctatcggtctcacacccgtatttagccttatgagaagactacctcacaatttgcgcttcaatcccaaaaagcacgactctatgcaggcgtaccgacacgtggatagacataggagcgagtacgggattgtcaccctctctgatgtcctgtcccaagaaacttagcaccaagctaccactggcaacgccgctcaagaccacaagtccgttggcaaattcaacggattttcactttgggctcctccctcttcgctcgccgttactaggggaatcatatttattttctcttcttccacttaattatatgtttaaattcagtggatagcctcacccaatctcaggaactccgttacggcacatcgtccacggcaacagataacagggttatgtaatgtcaactgactgagttagttattacacaacctagttatccattgctgttgacactgccaaatccatttgggactctatagtccactagccactgcattgtaaaacatagagtacttgcatacagcttagtttcactcatcaacaactagcgaccagagcctaaaatcgaaaacccccaacatgggttttcactcacatcccaactctaacagtggtaaccggtaactaagttatcagtcacatccattagttgggttgggataggaatttgaggttcactgaaatgggagtaccacgtgcaagcagaggtggtgtgtctaatacgttcagaaatctgttgattcgcagaagtctgcaagtcacaatgcttatcgcacttcgctgcgtccttcatcgttgtgtgagccaagacatccaccgctgaaagtttaaatcatagcattgggtaccagtgtttgtagactataataatccacattacattggtacacgtctttcacagatcatcaaggtaatatgtaaaacatagttaccaagatgataaagctccttaatctaccaagtatcttaaggaacatcccataaccacgtggacagtatgcaaaaggattaagatataaagtataataggttaataaattaacccaaaaccctaaacaatcctccacatactgatccgcattggcatgggcttacccgggtactcttcaaactactagtaactagtagaatgaggatccggcggggtagggtgtaacgccctcaaagtcaaccgaccaattgattgcctctatcgcttagccagctgaccctgagggatgacgataagcaaacccgaatggattttctaccgtcccgtcacatcttcccactaaaactagaacaccagtcttagcagaattaggtagtgaaactactagtgtagttcatgataggtagtaactactagtgagtcactcaatcaactctgttacaatgtggtccagaggacctagatggtaatgtgaatgatccttccgcaggttcacctacggaaaccttgttacgacttctccttcctttaagtgataaggttcacaaaacttccctagacgttccctgtcgggaacatcacggtccgaataattcaccggatcactcgatcggtaggagcgacgggcggtgtgtacaaagggcagggacgtaatctgcacaagctgatgacttgcgcatactaggcattcctcgttcacgattaacaattgcaataatcgatccccatcacgatgcgtactaaagattacccgggcctctcggccaaggataaactcgatgaacgcatcagtgtagcgcgcgtgcagcccaggacatctaagggcatcacagacctgttattgccttaaacttccttgcgatttataaccgcaaagtccctctaagaagcgatgacgggacagcgagagcttattcccgtaccctatttagcaggttaaggtctcgttcgttaacggaattaaccagacaaatcactccaccaactaagaacggccatgcaccaccacccaaagaatcaagaaagagctatcaatctgtcaatccttcctttgtctggacctggtgagtttccccgtgttgagtcaaattaagccgcaggctccacgcctggtggtgcccttccgtcaattcctttaagtttcagccttgcgaccatactccccccagaacccaaagactttgatttctctcaaggtgctgaaggagtcgtaaaaactgacgacctccaatctctagtcggcattgtttatggttaggactacgacggtatctgatcgtcttcgatcccctaactttcgttcttgattaatgaaaacatccttggcaaatgctttcgcagtagttcgtctttaacaaatctaagaatttcacctctgacagttaaatacgaatgcccccaactgttcctattaaccattactttggtacctaaaaccaacaaaatagaaccaaagtcctactttattattccatgctaaactattcaaggcaaaagcctgctttgagcactctaattttctcaaagtaaacatccagacaaagcgaactccgtccgaaataagccacatgcagagaccccgaagggacacagcgatgcagcagaaattcaactacgagctttttaactgcaacaattttaatatacgctattggagctggaattaccgcggctgctggcaccagacttgccctccaattgatactctggaagaggtttaaattcccatcattccaattacaagactttaagccccgtattgttatttcttgtcactacctccctgtgtcaggattgggtaatttgcgcgcctgctgccttccttagatgtggtagccgtttctcaggctccctctccggaatcgaaccctaattccccgttacccgtcgttgccccggtaggccaataccctaccgtccaaagctgataggtcagaaacttgaatgatacatcgcactaagtacgattcgcatatttattatgaatcaccggacaccgcaagcggtttggttttaggtctaataaacgccgccaaatggcctcgaacatgtattagccctacaattagcacggttatccatgtaaaaacgaacatcaaataaactataactgttgtaatgagccattcgcagtttcaccatataaaagcttatacttagacatgcatggcttaatctttaagacaagcatatgactactggcaggatcaaccaggttactattcaccatagatcaaccaacactatactagtatcagtctctctacagaacctacccctgtggttacaatactaacattattagtactcacttagtagattccagattagactactactttactagtgtagcctgtaactaccatataatgggttactaaagtgtacaacagatgaaaaccaacgtgagcatcagaagactacgaggatctagtgagtagcacatctgccataggtagctcagtggccaggtgagccaccagctgcaggtccctacccacgtaatccaaaagtattctcatgtcacgaccaagtacatcctcgcagctacaacctgaacatcaactcactacacaataatagtgtattgagccaatgaacaggtcttaacaatgagtttcacagccaaccacaatacacccagttactattagggagtatggttggtggagactcactgcttccgcaggattgtacactagactaggcaattcattagcaatgcttaccaatgtcacgccaacaagagacatcaaatgtcatctttactagtaattgattgttagttatgggacaaaatgtcaccctaacgacaatcactagtcacaatatccaccaatgtgatctactatagtagtgtcacacggtgttgattatactgttactaactaggtttgaagagctaacagaaccaggagctcagcagtagacctagagtatcacagtacatttaacgtctggaccagggaattgagggaggtccacataaaccattccaggattcagatcactcaacaataagaacatagtatttcattggcattgatattactacccttaacaaaatgtccaggcgaagtaataacaacctttgaaacagcaaacgtctgaaatttctagatttcagcatcaaacagtactcagtgccctaacataactcatttcttaggctgatatcactacccttaacaaaatgtccaggcgaagtaataacaactaatgaattagttcagacagggcctctcaaatattcactttgacaatttctcaggcatcttaactacccttaacaaaatgtccaggcgaagtaagataagactttgaaattgtcttagtgaaatttgatagagtctagactgaggtgctcacagacctcctctacatatatagttgaaaatgcaagttttaataactacgaaatctggggagtcaggccttttttgacacgataccaaaattaacaaaactcattagaatgataattatcaccactaatatttacataaatgttgaaagaaattgatttaaacttatttttcaaagtttgcgaaaggatgattaaaatttatgggccaaatttggaatcatggtggtccaaaatagaaaaacaccaaaatctgcttaaacagctgattttacaaaaaaataaaaagaaattcacaaaatagtaaataaaataaatgaaatgacgtatgtgggaacaactgtagattaaatttgaaataatgagtctcgcgagtgagtcacactataattgagataatcacacaataattgacagaatcacccattagttagataaattattgtgtaaaaatagtaaataaattattaaacgccgttataataggtttttgagttggaattaattatttacgttatttaattaagaattaaattttttgaaattcaatttagtgtagaattttccttcttccctttaattaattattaatttttctatttactaacaatataaatatttgatgaaggatatatcagtgtttatagataatagattgagaacatatatgttagatatgaatggaattgagaaatcaaagagttcagataatatcactttcagcctaagaattccacttccaaaaactcagaacatattcttaataacccttaaaatgtattttcaacattaattattatttttgccatcctgtgattaatgagtaatgtgtgttaaatgtgacttaggagagttgatgctagttttaaaaatggactgagagattctgtacaaatatcaagagctattctggtaagcattgcatcctataaactgtgtactagtatgaaattggtggaataatgacatatccacttgatgataacagaatagttctaattcaagtacttaaaaatccaacaataaagaaaaaactggacgagttattattaaatgatttcgaatacaccatgaaaagggttattgatagtagatatatcaaaacttaggtcaatggtgatgatgaaattctatcaagatgttccatattcacaatgtaaccacaacaatattcagcgtataaaagtataacattgatgtaggttgtgtgatttgttgaaaacgcggaagtggatccacgttggtaaatcaatggactacttagtgtcatctgatttcaaacattcaactgataagttacagactaaataaccaacactatgacataactagttaacacaacttaatcatggataaatttatagacaatcaatagcattctcttgcaatatagaaaagacggaaagagaaactgtattaaacgaaaaaaagctgaaaataaccataaaaatgatagtctatatagtgttaataaacaacattcaagtgaataataacaaccttatgaacaaagtaattgctatttactcaattaaatacgttaggatatgattggaactagtgttttatgcctacctaaatgctctggatatgccagaatcaactcttacaaaagttcaaatgaaactaacgactttctaatatcatactggtacaactaataacaattatataacattgatataactggtaatttttaatgataattaggaaaagatgccatggatactttttggaaccgaaagatgttgaagttacagtcaatgtatcattcaaaaactcgtcatacgattacccttcatcactactactcaaaagtcaaattgtcattttaccattcaaatcagaacaatacaaacatcaatcaattaacaaaatactcaagttagttaataaataattttttaacttgtaattaacacttccaacgtgaccagctaattgattgatagggatattgagggattgggggattatggaattgagtatgtagtaccagtggataatgtggagaatgaaattgatgaactaggttataagtcaaaatgggtgtcaaaatcaaaaactaagctattattaccaccattaaacacttttgaagtgaaaagtaagaacatcagaaagcataggttacctccaattgaatactgtgtgaagaataaatcacagaaatgtgatgaattaaatgtagatgataaaaacttactcaccaactcattctggtcaaatgttaatcaacaaatagagaaatttatgtaatacacataatattctacgtaatattatattctatggtgtatatacatactaatataccaacaccactatacatcacatagtgtatatactttgtataatattaacaatgtgttaaaagagaagtgaaagtaaaattagtaataatatggaatgataatcccagaggtgctaataagttcgacaaatttattatttcactgtcaagaccagataaatttaaattctggtgcaatgtaaactcggaagaacgggtgatagttgttacagtatcaataaactcttgaaacgccctgttaacaaacgttgataaatatacatcaatatcaccaaaaacattcctaaaaacaacatcagtaggtggtatgtgaaatgattagatcatagtgacaaacttatatgttagggagattggatatatgttcttgagagtattaacagccccttgtaaagaactgaaacacataatttttggtgaaaattattgttaaatacctgtgagcattggtttttgccgagttgatacaggacttgaaacaattactcaagtaatcaaatctattcttaagaaaaccaacagatacatcatgagcacttgataacccaatcttcttaataagtctgataaatttaggtataatagtataaaatactctattgtcttagcattctcatcataatcgttactaaatgacttaaacaactccgattccacagaagataacagacctttaacctatagaaattatactccaaccaacaaataataactatgaatatctagattatactttgtttaataggaaagttcctaatttactttctttggcgtcaggtatcgagtttaaaacctaatcaaacatataaattaactagttaaaatttacctgattaagtgaaagtaaaaatggcaaatttttataatcactctttaactcaaattcgttcaaaaatgttaacaaagtgtttaaatatttataatcagaatactcagagttaatctcagttaactcactaacaactctagataatgaatccttcaactcctacaacaaaatgaataataaatgtgtgaataagttagatttaagacattaaaacatactgtagccttatgagatattgaacttgaagatttagaaatatcaaaagccgttcttgataaattctcaacctatcaaaatatgaacaaagttagtccaaacaaatgtaatagtgttaaaaatgggtatataaagttatgataaacttaggtgtaatagttgagaacatgttgaaaagagttgttggaataattaatattctttaatgcgataggcgcggaatctaagacgaaattgtgtaaatttctccgaagtttctcatcatcattaagtaacttgtcctaaagggcggaaaagtgaaaatatattaaaacaaacataagttgatgaaatagagttataatctttggataataattgtagaaggaaggctgaaatctcagaacacttgccaggatcagataaatgagaaccagtaactacagaatacaaatcatcagcattattcatgtaataatgtacaacaaaaattaacaatatagaattctatgtgtgttgagattccccatccaacatgtaacatacatccattaacaaatataaccattcgatatgataatttaataacaatttttatgtttaatatataacttattagtcacaatataaatctgtataatgagtaaattaggtaaatttttaatattatttgttgaaatacaatttataggacaatactttcgtaatccttcagtattccatagtttactctttggaacagcagctggtaggaatattaactaatataatctgattaggtgtggtattttactcttcatatatcggattaagggcattaaaggtcaaattttttgatactgactacatcgctagacaaagtagatggcgttacttggaaaagcagcagttataccagagggaactagctcaggatatgaattccgcctacgttgcaagtctagctgaggaatatgacccggtcgctctaagacctccaggagctcccatgtaattccaataacaactaataatattcagggataccaaaaacgtactataacatttaatctaatacaatatactttgtatagtatatgtatatgcatagtatacattgtgtactgtatatctatagtgtatactaaattttaatgaataaattagggattattaaattccagcgagagaaccgaagaagattctagaattccataatgagtgtattaaaaaagtaatgatgatgttatcgtttttattttctatgagtgaccagagaagtccaattgagaataattggagaaatgaatgaggactgagatgattgagagaaaagataagcgatgaggctatagaagaatatatactgggtagaaaggaattaaagagtttaaacacgaaaacgcgatatagtaactcctcccaccaaggagctgtaacacaaggcccaaataatgttatcataattggaagagtttcatcagacgcacaaatcttagaaatctgctcatcagtaaaattagtctcatttcgtatatcgaaaacctttaaaaggtatagataagccatttctgcaaatctatacacaggaaacgatgaataataacccatgagaacttggtaaacccataatttactcaaatccaccttataccaaggattattcttggaaaacacgggaaacacgcacttatccaatattagagaccctaaaaaaatccaaaacaagtgacttgacatgagtgaaattgattttagcatgccagaactgactggaaagtcaagtgctgaaacaaaaagtaaaatatcgtcaattaactgtgaaaagaatgaagaaagaacgaatgaacctaaaagtgaaaaaacaaccatggacattttaaaaactgacttttcgggcaactgaaaatacttaccagtaaacttagaatcctttaacaaatagtacaaaattggtatggaaatgagagtgtcaagtgagatttcaataccatgaccagaatccatgggaaataactggtaaggtaatataaaccgaaatctgctcaacacaaaggtgtgtaaggcacttccaagaaacaaaagacaaaactggtcaaaagtagacaaatttgataaccgtttcttggccttatcaacggtgtcagttaaatatttgtatacatttgattttttaacatttttgacaaattttgtgacataagaagttaaatctgatgatttggtagttagtaaagtttttacatttgaaaccaaaggtgtttttttagattcagctggtaattgagttggttgtgaatccaaatgtgtaagtgatttgtcctttgctaataatttacattctgttaaaagattattagggtgaaattttggatagtttgaaactggatagggagaattaacaaatgcaaaactccttaacttagtaaggggaataatattgtgactgatttcatttatttgtatactcacacactgtggaattaggtttatccagtaaagaaataatataaaaacaaatctcatccaattcccatatttattcattatttagctcctagtttaccattttcaaagctttattggaatcaatttaattatatttgatgtgctaaacaaacgtagaatccttccattgaaattttctgaaattatccaaaaattggaaaatataataataatacaacactgacaatgctaatattacccttaaaaataaaaatagaaagataatatttataactacaatcctaatgtgatgtgtaaatgattagaaaatataatgtataaattgggaagatttgaatatagttttaattataaaatatttggaatagattcaaaaaatgaatataagaaggaaggattggacgtggacatatttataggtttgtatggaatttaaatgatttggtaggaactgcaataaatgaaactgaggaagttttaaaattaaataacagttttttatcgcaaaaactaaaggagccagaattacaagagtttttaaaatcatttgtttgtttggcatttcctttttatagtccatatgtcccatatgatgaaatattaatcgaaaatccaatgcatagcaatataaacatcatatcaaagtataatttattgtatttatcaatgttgtgtaggaacgttttgaatatttttttaaaggcttcgaaatgttcaagtaatgagacgttgtgtaaattagggtacgttgtttgtgtgttacagccgtgatttagattttctgacccaaaattcatgttaaatctgattaacatgtatgggagaaataatgaaaagttagtaaacgagattattaaagcctgtaaaatggttaatagtaaatttattgaggatatgctctcagtagcccgtacgttgttacaggtactatttaaaattcttttgtaaaattattaattttcagactttgagtgacatgtatcagtttttgaggttattcgcagactcttgtaacaattatgataagatggttgagcagtttacaagcaactcaatcctagcagaccgctcaactgggacagattacaacaaagtatttgttaacagtgaccatataatgttggatatcgttgccatacttgatagcgttttaaaattcactcctgaacgctcatatccctatttcttgggacttgatgttaagactaaacatggtgttagtaaactcgaacaagtactcacaaactgttattatttactactttacctatatcaactaatggataataccaaggaacctatttatgaaatcaaggtaacatcataactaacactatagttatatattataatatttaaccatccagtgctaatagtggatatagaattttgagaaggactatatgacgagttttcaaatttgcgtgtattatagatccagaatattcatacttaaaattctccttaaaattgtacagtataacattctttcttctcctgcagactcagcagaatattcatataactggctactaatcttcataaaggtatggattaagttttattagtgtttagatgggaggtgaccagtatagcatagacagagacttgatagtccaggactttaatgagattaacttttcaatatacgtcgatgagtggaatatgattaacaaaaactggtaccctaaatcgtaataattgttcttaggactgaggctgaaattgctcaaatgaaatcactagtagttaatcttaaggtatttgtaaacattattatggatgtttaggataaaaacatggaacaaaccataacgttaggattaaattactttataataagttataattagttatatatccattaaatacacactaataacccaatgtactttagtaagataagagaaataactgaaattgaagatgaagatgtgatattaaattgcttaagtaagcatgaaaatgatatcgactcgacaataattgacctgattgacaactttacaagtaaactaataataattaacaatgttttagtaacgaaaaaaacaagcaaactgcctacagagattgggaaaaggggagttgaaaagctatcaatctcgtatataccaacggaaaataaacaagcaataatgaattactggtaagaataataaaatggaggtgaaaaaaattacttagggattatataaatgaaaattcggaaatgtataatgatgataacgaggaggaagatgatataccactgaatgtaaatttaaacattgataatctctcccaatcggaaggctcagaagaggataaaccagctcagaaaggaagaaacttttataggaataaggagaatcacaaggcacattatggaaaccatcatagaagagataggtaatgatttaaaaaagtcaaatttcatttttagacatcgaaaaaaaatgcagtctggaatgttaaattaaaattttaataattttttaattgttcaaaaaattttccctctcttgcttactctgaatgtagtgccgtcaaatattttagtttattccttggacttgtgtaaaatggtactcaatatgagtattaataattattctcctgtattatagctttatcaataatcattttcgttgtaatatagctttatatgttggataaatacaagtccgtgggtcccatcgatggacgataccataaatacacgttccatatatcagattacctctctgagtataaaataatgtcaaatcgaatattagtagaagttagatggctacagtatttggttagactgggaataacacctgtaaaatctctatctcaagagtcaataggttagctttcccacccattaacaaattttcagattttcttgaatctctaaggtttatttctgaagaggaactccaaaaaatatttgaactggataccaagatgatgcacgatgtcaaagccgttgaatactacatcagagtattgattattttgtacagtaactacttagttattcattaaacagtaattttatcacatgttctaccacaataacattaatcatttgtaataaattactataccttgataaaaattctttagaaaagatttgaagttgatggaactccagagttgaagaagcttataacttgggttcatgtgttttgtactagtgaagatataaacagtccctcatactcaatgggtataagagactgtatgaattttgtaatgaaaccgctaatgttagagattatttcatctttgtgcaaacttgcgttagaggtattttaacacaaaattaaattattttagaacgcaaagatgcccatgttgtccaggacacatggtcaaccagccattcctacgacatttggaaaggaagtttccacgttcgtctacagattatcatatcagtataaaaagtgtatttcaaatgtaagcataaacagatgtttataatcggtgtagattgattattttgctaaatttggaggtgcggtgggaaactataatgctcactactatgctttccctgatttagattggactggtcacgttaaaaacttcatagaggtatggataactggttttaaatatgagttataggaacttggacttaaatatcagccttatactactcaaattgagtgccatgatttcatatcagaactgtctgacagcatttgtagatttaacacaatcttaaaaaacatgtgtcttgatttctggctatacaactcaaagtaagttaactatttcttaactgttattaggggattactgagattaaagaatgttaagggtgaagttggcagtagtacaatgcctcataagattaacccaattgaccttgaaaatgctgaagggaatttagggctttcaaactcaatgtttcacttcttcagcactaaacttccaatgagtagaatgcaaagagacctttcagattcctcagtcctcagaaaccttggagtcgcttttgcacattccgttattgcctataattccatccttttttctctagaacgactttactttgatgaatccacttccaaacttgaaatacaagaaaattggaatatactttcagaacccctacaactgaatcttaaaatgtattttccccggccattattagttatatgattttattagtattattaacgttatagattttcacaaccctctaataattcatttgtaggatgggacatttggatgcatttgagaaggtgttgaagtttacgagggggtttaatccgtcaaaggatgaaatgcagacgtttatagaaaagaactgtggaaaggattctaggctgttgacattaaaactggaagaatatcttggacttgccgaaaaactggcaaaaaacgttgtaaattatcttcccaaggaattgtcatcaaaatttgtaaatgtaccaccttaatgtttagttatttatatatactatgtatattatgtagtgtgaagtagtatattattaacgtttaacccattttcgctgagatctagcaccagttctcccaggcattttaggcattttttgcctcaaatcttcatagagtgagtctaaacaatagttataaatgtggacaaacctttcaaataataatgcaaagaaggattggagttgactaaagctctggcaactgcgagtcttgttgccctagactgacctgtagtccctcccccctttgtcttaataaaaagatcaaaaacaccagcacaacctgaaatataaaacggctccaacacatccatcctaattcaaatattaagttcacataggtatggaaatatgaaggtaatattatatatatatacaatgtaagtaataccgattatagaaaagaggccatcttttgtaaagatcttcttcaccgttgattttaaccttgaactaaataggaaaatgtaaacgtacaattcctgaaccacggttaagtataacatggcttgttgacctcatacaagtgccatacccctcagaataaacattccaccaactattattatgccaaaacaactattaacaacaatttactatttggtgtaatgatacatactaactaatactacattagtgaatgtgtaactgggtaaaagaatacgtttagggaatttggatgaagtttggatgcgataattttattaaaattcgaaatttcagactcaggctcaatgtacatgttaaattcaggattttcaggctcagatttcaaatcttcggattcagcctcggcggaatcctgaggaggcctgtttttaaaaaagttactgattaaaaagggagatttatcctaaaaatacacttaaaatctatttaaatacattggaaaatgaaggagaatagattataagcttctgaatctctgcttttgtcgtgattccagcctcctttgccaaatacagagcctattgaatagaatctcaaatgtaataaaccaacctcatccaaagataatgctcttttaatactcataacaaattaataacatagataatcatagaaattttataaatatagtgaataatgtgaatgtggtgtgtgaagttacaagattaggtacattttccggatgaaaaattcatcttcttaaaaactgaagattcttgacaggagtctgtaagaccgcgattggtaggaactttggaggcagtgttaagactaacagtggaagcaggagcattagaagggtactgggtaaccttgtccttgagagccttagcaatagtcgtaaatgcctaaaataacaaaaataaatatgataaaaattaccttctcaacattactatcagttttagccgaggcttcaatgtagttcatgttattctgctcagcaacatgcttcgcttcatcggctgaaacgacacgagactcagccaaatcaattttgttcccgattaataatttacaaacattcgatgtagcatatctgtaaatttcatgataaatattatcattagtttgtatatttaaagggtaaggtatgcaaaaattacttatcaatgtcctgtaaccatgtctcagtgatatggtcgaaagaaagcttattagttacatcgtaaacgcaaataatgccatgagcacctctgtaataagtggaggtgatagtcctaaagcgttcctggcctgcagtatcccactaaaagtaaatatatttatataataatggaaaaactaacaatttgaagttttatggttgtattatctatttttacagttttaatcttaaaatctactcctatagtactcatataagactcgctataagtgttatcctgaaaattattagtaaaacgatgaaaataaataaaaataccgcaaatctaagcaatagagatgatttcccagtcccactatcaccaataacaataattttaaacaaataatcgtactctttcatttttacaaataaaagtagtaaacataaagtgatttctgaaaacacaaaaagttgttgggaggcttagcagtaatttagatatagcactccataaattggaagatgtaagttacttgatcctaataactaaaaaagggcctcaaatgtccagatttggaagatttggcttattatgaatattgattctcctctgaaaaatgaacgcaaacgcactgataactctgattctagtttaagcgaatatgaccctgaattatgccgagaattccagttgaacttcttttctaatttatctgaccttctcaggtctacctccctctgtaacatattgcaatcccattccaaggtttggttttattctcctaactttttatttttcagattctagtcattaactctaaagttcccctgctaaaatgtctgaaatcaatgtcaaactatcgtaagtttactttaaattaatgatttttttagatttggattttgccctgatctatgattctgaatccatggctatttctggatacatagatgaattcgccctcattaaaataatcataaactttgatagctacatcggattaaactgcgctcaattcctaagtattttctaattttaaaacagtttttagaggtagaaagcgactcgactgtgctacacaaattaccagtaacctcgacctcatatgaaggatttgaatatactctcagaaacatgtaataaatctactaatctaaactatcaaaactaataattatctattgtttttagggcaaatcgtgtttttgtttggtcagatgataggaaagcaccaattggatttgtgacaccttcttgctatttggtgtatttagtaaaaaacttaaggggaaaacaacgtttacttgaattaccgctaaagtcaatcgctgtcaatcataattttaataaaattttttatcaatccacactcaaagaggtatgttttcacactaatacatgattaggcattggaatttctcaattttgaagataacttgggactagttgatcttgaaggtttgtttattattcataaatttgattttattgatttatacttgtgattagggaagttggttggagttttaacaaggcgtaaagtaacatattattgcctgaagcaaattttaaaagaagtatgttggtggttaattaataaattttagtcgcaagtgatactttccactacgttggaacagttgaataatcatgtggatcacatttttaataagaaacgccgaaatttaagtgtaagaaataagaaaatgtatttaattatttaggttgaaggaggaatttcactttacaaggccatcgcttgtattttagtatcaaatgaaaggattttagcgtatagagatgagttagtttttatctttataaatttaataatttaaacccaggaatggcgtggatttattagttacggtttgggacatatttcgtttttttggtttttcatagagtgtgggaaattttccccaaaattttaattttttaccaaatatattgatattttaatacataaaatgttagtaatatttatcatacacttgtgtgtacaattagtaatttctcaagcgccggaagatttaaaaaatgaaagtggtgtcgttggagaagtagttaactttaaaagcgtagtagcaaaaggaggtgtatcaacatctctattgacaatagtaccaaattcctctagtaaatcctcaatactgtttttgggtgataaaaactactcaatgggtgttgattctgttggtaatttttcatttaacgcccaaaatactccaatgcttataatagacaataatcagacaatttcaatgcatatgcctactttttcagcaaagtatatgaatatttaataaatgtgtaaattaattcaggaatatggaacttggaggcgaccttatcatacaaaatgtgcctcaatttagaatgatttggagagaagacttttcagaagcgaaaggctggaaaggaacaggttttaaaattaatataaacaaaatgtgtgtttagttgggaaagttggagtttcaaattgctctggtgttcaaatgttaggaggtttcaacttcttttcaagagtaattgaatattaatttaattaaagtatttagggatttgtagaaaaaacttttattgagttgccatcgcataaagaacttagaattagagctaattatcacttcatcgaccgatgggtatgggaaatcttatgtatgatgatgtatgattcgtaggttggtgagactgggtatatgaaaatcagcatgtctgatggtttaatggaatatgtttggactgaaaggtaaaaggattgaacaagtagaaatttatagacactttcatcaggaggggaatacaattaacatttgcggaggtagacgtattaattataatgtaatttagatgaaactggggatgacaagttttcaacactgatagtatgaaattctcatcatattaattaataggatgtaacaatagttcacgactcggaaagattcacgatttgtaacctaatcattacaatcatattactttagtgtttgggtcaactttaattggggacgcatcaaaacagtcttggggtatatcaggacttgaaatttacataagataattgctctaatatactatactaatatggaaatattcacaaataatctgatatgtataatagtattagtagtgtattaaatcagtttaaaggttcaattctgaactttttagttccagctcttaatctggttccaatatttttacctaaaaatgattaaatcagggattggaaattaccatctaacacgaggcaaactcttcccatgttatcaggtgagtagtgttcaaccatctacacaatcattagaaaaggggggaataccttccaggcgtcagacatggtcgaggccagaatagcaacgagagttatacaagtggtattactggaagcctcttccttccctggaacatttctcaaaaccaccaacatctcatttttagccaattccttcaatgaacgcctcgctgaaaaattattacattattatttcaaattgtgagtgtagtgtgtgagttacctagttttctgagggtttgaagttcgttaaattcttcctttgagtgttcaatggaaagaagagctggaaaaaaataaactaagaaaacatacgaagtaaatcctccaaaagtgaaatccacatattctcctaagtaataataaaaatgataaaagtatacctccttaagccacgaagatacatcaagttccacagtattgtcaggatgaaactcgagaagaacttgtaatgttgaaagaggagtaccagtctgaaggtagataaacgaaattctaacatacctggcatgaaaataaccagggtagtgataaatatgattcatcctcaaccacactcaaatcaactaaaaacaaacaatattatagtcccgtgtacataaatgatgagatgtgtaatcataactattggtttagggtgtaaatataaaatgtgtaagtaaaataacaaagtatatgtgataccgggaacgtggaaatcttcatttagtgaatcttttgaatttgcattgtcttttgacaataaatactgttctaaatttaaaatcctccgttctaggcgcaatttctctgaataaaatgttaaactcatagaaataaattataattcatacccttttctaaattttgaatcccatcatttaattccttaacaatagtcaaaagtggatcatatttggtaaggataaacgactccaaatcagtcaaatttgaagttacaacctcagtttccatgttaaaaataaaaaataaacatgatacataaaataaaattgaagaaaattaaacaaatagtgtacgaatttttacacattgaatcaaacccaatattaaataaacagacaggtgtgaaatgagttttcactaatattaatgattatttttcaatattaatgtttgtttttaattaaatctttaatcctggtcacttcattaataaaatgaaccttttccgattcatctgcaaattgtatagccacagaatcagtgaagttagaggcactaaataaaaccatattttctaatttaatgttcctatccttactaatttgccttgaaaattccttcattattacttctctatctgtaaccagtttgccaatgagtttaatgggaaagaatcttgagattttgtttctgttcatgtaaattacctccatttcagggtctatagttaacattagaaatgctggtttctctctagtttttgtgtaaaatagtataggaactccttcttcctcaggaaccttcttaaaataactttcaaagtctagttcttggtcttgtccctcatcttcccattttaccattccagactctttacttgtcatttgtttcaactcagtatatgattctttaatggtcattttttttaacatggtagaagattctttactttccatttctcttagtaatcctgattcttcatttgttttaatctcgtccattttttgtacctcttcttccaaatctgactctccataattactatcatttgagcttttatccatataatcttcatcatcattgctcattacatctgtggaatagtcacttgatttttcaaattcatacctttggtaatttttattttttgaagtctctgaatagtcgtatgaactaccatatgaattactaatcaataaatcaaaatcctcatccatgggatcgaagccacagcaaaccgccaacttaatgacgacttctggaactacaggatccgctactcttttgtatcttccgttattaaatggaatgaccttggcataaggtccactaccaccgccttccatgtttaaatctatctctagttaaatataaactaatgtaatgtgtatgtgtaaattcatttaaaatgaatattagtaacagtagctgatagctaggagaaaacaattagaatcatgcaattctactaggcatgtgcaactttatgcacctgggaatatttggacaggaatctggtaaaatgttcgaaacctaaagttcatcttcgaatttaaaaattaaaacacccaaaatattgatgctctaataatactaaaatggtagtgaaattaagtataatagtataatataggataaataatatgaagatgaacgaaaagggtgatatttagaatctatagtacatcggtatctgtattaatctgaaataacccccatgattatatgtgtaatattttctatcatataaaatatgtttagttgataattttattaatgaatggcgaaataagacaaattttactaattctattcatttgtgctcagattgtagtgttaacaaaacaacatacaccgagtaagaatataaaaactggaaataaaattataaaaaatactgaaaatactcttgaaccggggaggttttcacaactccaaggatatggaacagtcgaggtgagttaaatatataagtagtatcaaattttgtgtaggatgttgagccgcagccaaaaataagaatatatgtgtacaatccaccaaactcgtttaatcctacaaacgaaatgtttgaataataatattcaaattttgtaaatgaaattattcatttggttgaaatgtaaacatactgtaggttcagtgaaagaacgttgagggaaatggagaatgaaagattcaaggaacaagtaagaagttttttaaaattttaataaaattaatttaatagtcgaataaagcggagaacgaatttgaaagtattaaggaatcccaggtattttgtaattagtcaacgagacatggtgtagaagagacagctagcgaggataatgggtaacatttgtgaaaattttgaaaaacatgaatttttagatgcagtcgagagatattctaacgagatttaacgtgttatttttttattttgactgttagcacgatatgatgtccgtagtgctgattttcccgtagaatctccataaaatttattaatatgaatgctagccctgattaaaaaataatattttaaaatattgtaatatttacaacagatatattattttttagtcagttgttatacctgctcccaaatttactttttactaggaattaatattttgtaccataattttagtattttgaatttagaatgactaatgaagccattgatgatttgaatattggagaagtttatataaactcctccagtctggctgattcccagattaaagccctggtaatttcatttcttatgttcaccacattctattacattttaaatctcctactatttcaatatgtgataaatatgttgtttaggaccagcttttgggttttaaatgctccaggcttgaaaaaaaactgaaggcgcttcagttgaaacgtaaatatttatcagagggaaaggacatcaatgtcagtttgaacgaactcatttcccgagaacttatcgaggctgcagatttcttatctgcctcaaccgaaaccgaatacccaaatttagaagtatgtttactaacactattgttaactagattattattactgtttattacattactataaactacatactataattatacttaatatattattatatctgttgtgtagagtgtggaacttgattcaaataaggtaatgacattgtaatataattggaattaggagataacgagaataattgatacaattaactcaagggatacttcagaggaaaaacatgtacatttcgaagaaagtgaggaggaagaatcccaaaccgcatccagtgagtctggagaggccaaatatgaagaatttcaaagaaagaagaaaaggtcaacaacgttgccaaacccaaacgttaagatgaatctatgtatgtttataaaaagttaatagatatcgagtatatactgattaaaaatttttatattaaataatttttagctggtgaagtacagctaatacttcacaacaagggtacttgcaaaccatgtgcgtttgtatataacaagaagaaaacctgccgaaacggaccgagttgcgggttttgccatcatgaagaccacgcattgtgtaccctcaagaggtggaagaaacagcagaaactagcttcggtaatttttgtccataattatggttttttagaccggaagctttacaacagagattatttcacaactaacacgttccagctcaggacttgcatagctttgtttaatatcctgctacttcattatattttattatttgtgtattcacaggattccacacaagagtagaatttagttcataaattttataattttttatttaaaataatatgttttctattttttaaaataatttataattgtaaaatataaaatgaccgaaaattcgcctgaaaacgaagttggagatgaacggttcaaattaaaggccagattcagaaaaaagaaagaaaaaacatttgaaaaggatgaaagatttgataaagttcttaaagaagatgtaaaatcgaaaactggacccaaaattgacccatttggtcgaccattaggtaaatttgattattctaacggaaaattttcagatgatacatcaattaatgaaatatattcttcctctgatgaagaagatttggaagagggattagattcaagcgtaaaggaggaaaaggaacccatagaatatgtaatttataatattagtatagctgatgaatttagggtgaagaaagtgatcgcattgcagtaattggctgtgactgggacaatataacagcggatgatctatttgttctattcgaaactatctatagatcaataactaataacaattttgtcaccgcagttaaaagggcggctatatacctgtcagatattggtgaaaagaagatttcagaagagaatgtatcagggccctcaatagtaagttctcattgaaataataaatattttaggaaaatgatacagataaacgtgatgaagaaggttttactatatattattttgtttagcatttagggattaacacttatttagatgatgatgagactagacaagaggcgcttagaaagtaccaaaaggaacgttcaaggtaatttttaggtgttatattgtgattagatattattacggtgttgtggaacttaattctgtggaaaaggccaaaattctgtacgatgaacttgacggaacagaagtgtcgtttgcaatagatggcttggatttacgttttgttccagcgtctttggagtttccaaggaaaccaacgtctgaatcctttaaaataccagataactatcaacctccagtaggttctcaatcggccttgagacactcaaaagttgaatgtaagtgggatataactcctgcaaaaagattcaaaaccttaacaaaaaggtattaatatacttttattccaaaattaggttcactgaacaagaattagcctctttggatttgtcagaatacttagcctcggatgatagtgaaaatgatgtggaagaggaaaatgtgtcaaactacaaaagattagtaaaagtaagcttttaacacacaacataaatctttaggaagttaacatggaatctgatactgaagatgatgataaagaaggggactacagtgagtcattatcagatgaagatgaggatgaactggaaaatgatggtaatgagcatatatcagccacagttggaaactttaaaatctcatttggtcctgatgtagcaataccaacagaagagtacgtttaaatggtttaataaaatatttagagttgttgacaaaccaggagattataatggaaaactgaaaaagaagaagaataaatttaagaataaaagaggaattgacgaacatacaattgaggttagtttaaattagtgataaaatcaatagggacgtcactttgatatgagatatttgaagagtaaaaagcatcaaagtaaacttcaacagccaggattccaggtaacaaatgcattattcacaattaaaatagtcaaatttcgatgatgagaggcttaagaaggtgttccaggatcccaaattcgaaattgacacaactgacccgaattataaagtaagaattgataatctgataaattaaactttagaaaactgaatttaaccaaaaattgcttgaactaaaatctaaacgtaaaaactaattaacacctaacatttcatgtaatgtgttactttatacttttattcttatgtatgtatatttgtaaataatgtagttatgacagaaaataactctcagttgtatttgaagttccttttatcggtatttattatacataactcaatttaacttagggaggcacaccttcggcggcaaagacacttttagaccaagtaaataaatttttaccaataatttaaatgaatttacatagataagtgtggaagaaatggttttccaactagtttcatgtccgccagagtctttcattccatacacctcagatccagaagaagattccacaaccaccgaggctctggatgaaaaatacttgggaaacttgattataagaacactagatctactcctggataaaagaatgtatgaaactatatttaataatcaacaggttgagatatttgataatgtaaatctgtagataatggatgttttaagtcaaggaatatcagaatataactattatgctaaaagactaatttcaaaacatattaggaaatatttagaaaatggtatcaattgtttaaaaatcattatttccaatttaggaggaaaaaacaataatgtttacgaggtggcttggaatttattgcttgacagggaatacagcgtatttgaggattcttcaaacgctatttgttctgtaagattttaagtttaatgttttgttcagattgtttctaggcctggagaagaggcttttttgaaccaggagagactggctttattattgaagtgtgtatcaggagaaatggaggtattttaatgatttattcacatatttgttaaggttaaggacattgacaaggttacattggaactcagggtattagaattttgtacaatgttaggaaaggcaagtcagttctgtttcaacctcttacgtgataatcaagtttacgatcatatatttaagctttatatgaacgaggatgtactagttaagctaaactgtttggaaatattagaatctatggttccgctaattaaaaagcttaattttgaatcaaaatcggcaagggattttatgaaagatgctgtagaggttttcagtaagaaggatttagatgttgagtccgatttagtggcaggtcctttgctaagatttttcagtgccatagttttgatggataatgttctaaaagaagatgaagttgttttattttctcagtgtgtagctgataacattttgaactgcacaaaaaaaacaattcaatattactcatctcttgcttgttttgggtcactgtttattagaggatatttaagtgaagaagtgtcgtataaatttctacaaataatcaataattgcactaatgaagatgttctgtatgcctgcctagagtctttgcagtttgttagccaggctggcgactcatctaaatcgaaatttatatcagaggcctcagcttgtatagcatcagctacttctaggtttcctttcagcgaagttagggaagcttgtttttcgtatttgatgaattctctagattacaacggtgttacagaacttctaattaagttagaaaatgaatctcgtttactaagcgcccaggagaataattatgaaacaactttaactaagagaaaactcatcaaaaagtttctatatagtgtagaacagttgtataagcctgaatcctgccctctctcggattctacagttaaattgttaaaatctgtttaatttatggattagaatgactaatacatgaatgatattccttattaaccatcatacactttgtaaattggatgtataatatatcaatagtacttgtttatatgttaattagattaaaaatatctttaagagtgttaaaaataaattgtttagagaatattattaagaagtgtggtgtgagtgatgaagttggaaaatggatcattgatactaaattataattaatttaacatttaatatttaaagaatataataaaatgaatagttaaacaaaattaattaacttataaaagggtgcacgtcaccaacgtcttatgtcgaatttaatctatgaatatacacaggtttaacatacgaataatgatcttttaatgtactggatttttagttaacttttaaattgttggattctggtccggtaatgtgttttatatcatattcccttggcggatattgataatgtgttttaattaagatttaaatgtagtataattaactaacaaacatagaattaagctttttcctgatataaattataaaaaaattaaatgtagtgatataagttttgatatgggaaagctttacgggctttaatcctatctgaagagtcgttaacagtatagcaactactaagtaggatgacgtcaagtagttataaggacgatgttgataaaaatagagccaatcggtactctagtctgtaccatgattggtttatgattggtgtaggatgttttacatactttctcgttggtctatcacttactctggtttatgtactatgtgagatggattatttcatgttatctggtttatttcgtattcagagattcttttcagacgatgcatattacttcagtaaacaggtaacattgatatatggtgttattggattcatcttgacattgttgattggaccaattggtaaggtgtcatgtatattgtggtcttgggtcttaacattgacatatcttgtggtgggaacatactcgtacttgtttagatttactcagtatggcaagcttttaattaaatcaatgagcataatatcactcataacacatatcctgatgtgtaacttcatattcttcctatttgatcctatgaataaggacaaaattaaagcgaacgagtcatcagatagtaatggtaaacactcaagtgtgattggaccatatggatcacttgtgtattatagggtcatattgttcctcgtcggatttttccttggatctcctcttgtttcgtgtgtgttgaggatgagtctctcggctactacattttctgaaaaggatcccatcatgtcttcagttgacttgtgtagaataatgatgctgatgttctcaataaccgtcatggccagtacattcctaacactcacgttctcaaatggccttagtcctgtaacagatcacatttggtttccgtttagtatgatatcctatagaacatttaagaagaccatgtttaacttctttgatcttgagttgctacttgttgtatggatcatcaatcctctaatcatgactctaattccgtacacaactaggatccactttgagttccataaattctctttagttcacagattgctttttgcagtcatgctcattgccataatgatacttatgcatagagacattatctatagctgtatcaggaccatcaaattaattaacgcatcaatattcaacatcttgtatactgatggatacacgcagatatgtgatgaacaccttaggaaggaaccagtatcaacaactccatattctaactacactgtgagaacaaacgttagtacagaaccgatggttgttccacatgagatttcaattcaatcagttgtatcatatccttatcttgagaatggctgggatgatgttgaaaatgaagataaaaagctcttatggaggtcatatcacatgcttcaatcacttcagagactaacacatctcattaatactggaggtgatatggatatccgtaacatcttctctgacccagaactatcactgtgtaagccacaaatagataattcagatgatatatcagagaacaatgctgatgactcaatgaaaagcatagtctttctactgaatgagtacagaagtgagctgttatcaatgttaggtaatacaattaatagatactggtttgacaaattcgttttttcacgttctgaatgttgtacaaccaacttgctttttcgcatagttctcactttattgatcaagtttaaaaaactggattcgtcaatttctcaattcccatcatgtacatgctattcttctattatttcccttttttatataattttacttctctccgtaattgctacttcaaaaattttgttcaagttaactgatcacatgactgaagaggaaacacaaaacattcagtctgatcaatcgctcaggtctactatactattacagaatatatctaggttgacaaaagatttgaatgatcttgtttggattttactgtctaatagttcattacttgaatctagaatggttttgcttagattatgtgagtatgaatttaaagtatccgctattctcgaagtactcaaaccagttgataattgttgttgtgtttgctgttataaatgcaaaaataacaaggttgagggtgaaaataatgataataataaagaatgtaatctaaaagaaaagttgactgttttaaacccaaaaggtttgagttcgtatactgattttttatctgaaaacatagttgaaggaaatcacccctgtatgtgcatagttattaagtatcgattaattgaaaatgtcaagatatctcgatgttatctccgcaataagtctcttaacgtcttaagcactattggaagaaaatttgaaaagcattcttattcagcaactcaacttttggatgtttcgaaatttatttattttgttatagacaccttgttaaatttaacattttggatgaaaagaagatatctttgtaattgtgacaaaagtaagtgctgtagctctgatggtaacaataattgtacatgttgtaatggtgataaagtaaaatgctgcttgtgtccgagttcgaaatctgaatgtaaatgttcttgtaaatctggtaatacttgcaacgaattatgttgtcgagggcaatctcacagtgggaataattgcgtttgttgtagatgctgttgtagttgtttttgcaaaaagtcccatgatgaatattatttctatttcataacaatgattttttatatatcccaactctttgaagacgtgttcacatttgacaatgaaaaaattcgaatggccatccaatttatatccagtttggttttttattatgatccattcaatttttctaaaaattcattttcatcaaaacgtacttttataaattattacagactcgttttgaatcctaaatcagatccaataaccaaaattgaatctggcacaattttaaaactaataaatggtcaaatagttttttttttcagattttccgagataaccataaatttgaattcagaattgttcaaaaaagtttttcaaataatctctgaactgatattttttataattaaaggtggttttatttcaaccaaagttgatggaaatattgtaggaatactaattcgtctttcaaataaatatattttgatcctatttaatgaagaattaaaacaaacacagcaggctttgaattgtcatacagataacaataaatgcaactgtagccgttgtaaaatattttggtcgtctttatacttattttccataaaatataattcaatagcttccctgctacaaaatcttgggataataatttccttaaatataggtttgggcaaagtgaatatatattataacgaattcctgataagatttaccaagaactccaggataagcgaatctacacatggcctgttatatgaaaggaatggtaattttgaccacattaatcctaagtactttggttacgatgatgtttatagacccagtccacagtttggatcaggatacttcaaatttgtgattaccagagtgttcactgtcattgtactggtggttctgttcatattcataaggactagatttgacagatttgtcaatactgatatctttggcagatacttgatcaaggtagactctaacattggtaggctcagggaggtacttcacaacagactaagtcacagcgttaggaacattagcaggatgggaagtcttgacgatctcctaggtgacatgacagaaggtgatgttggtcataacctagtctttcatcatccagagcggtatcaagatgtcattgataatatgggtatggctgacatgggtcactatgatgctatgtctgatattgacacactttctgacacattcacagatgccagctttgatggaagcactaaggctgtccaggagtccaggagaagaaaggttggattctacatcctcatcattgtgttctcacttctgtctgcactgtatctgaactttgtagttagagacctatctgtaatgctacagctagatcataccacctggtcttacttcataagcattacggtgttgatgggtatgatcatcagtctagtggttaagtattgtgtgcacctatatgacttcgtgtatgtgctggagaactacagtaataagctgactaagattgagagctttgtcgatgacagttttggtggagtcactggtaacctaacttacacatctaagtttgtactgctgttccaattgctgaggagtatgaagactgacctagtatctctgtttagtatgaattatccatatcaaatacctgcacacagtctgatgaagaataaggtatatccctacaaggacatgactggtggcatggagagaatgatgacatgtgagaacatcgagtgtatcaggaagatggttttagagtccattggcactccagaatccatggatctgcaaaatgtacttgacttcgtatcttatgttactgtcagaaacacagctgagtttgatcagtaccgtggttactttagtggctttgaacggtacctggcttggagacttgggaaactgcttggtcataacttcttcctactgacctatggcagatactcatgtatgcttgagatggatcataggattaggaaactcagaataccaagcacacagtttcttaactgtcagttcctgtggcaactatttggcaattatgaatctgacctcatatcactcaagtgcttgggtgaagattcaataggtattccactaacgcatgttcagaaggatgtcctcaagaataagttcgctgatgaataccttgatgagttcaaaaagtaccaagagttcttgatcaggaaacttcatattaaagcctctaagtgttatgactctcccagctgttactttccatatccagaactcatcaacactacacttgatagggacaaagtctctagactgacaagagagtactttggtgacagcagcagaagactaagtctatcactgccaacaaccaactgtgatgttacaaacaagattgtcaacggaaaaggtgctgagtcacctggtgtttcagttactcagttctgtgatcactggttagatatgagacttagttgttgtgagactgaggattgtgagaagggagtcagatttgcacacgacctgataatgtcaaaactaaacggtgactgtaatgtatttgagtcaataagggataccgttgctaatcttaagcttagtatccttaatacagaagagacttatgagacaccagaggatatccacgtacccgtaaagtcctcagagcatagatcactgaaggactatactgataagcttacagagtttagatatcagacaacagataactaccaggatacagtgctggattacctgaacagatacatgattgagactatgactaatagggagaaaatcatggtgccactaggaatattccttacctggtacggaataccagtatgtgaacagcatttaaggaatatgggtaaatttcagtatctgatataagaaacagtggttaatgcagtttaagatttaagatttcagatttaaatgtttatgatttaagatttgtaaaatgtaatgtagtataatatatagtatgcctagtagtatattaataaactgcattgtgaatagaatttacagtctaggtattattaataagttgtttgatagagttgaacttatccagtatgtgagattgttttaaatattgcttggtctgagcctttatcttgtttagaatattggggttagtctcgtctattttgacatttgaaatgaggggggtgaacctatagtagacatctcttggcatggtaaattctagagctgaatgggtcatctcagaagtagtgacggcataagttaagtgagtaattaactggtcaagactaaggtttttattctccttcttggtgttgatggtattagtggttccgtgatccatgcaattttcgtacatttttaccaagttggtagtctcctcactttgaccactgccgttatcactagccccgttgggactaacttgagacaagccattaccaatgctaaccagcagttcaacaggagtgtcagggtaaagtaatttagactcgatgagtgcaactacagagggattgttgcagtacaaagctccgtcaccataaagatgtccatttcgctcaaatagggggaaataacccaaagctgaggttgtagcctttatcgcgtcccttaaccttattgtacaactgccgccgttgatgtcaattaacttgttgagctcttcaattgaatgatccttagaacccagggagtaaatgtccttgtggtagttgtagttgcgccatattattggcctcaagggtgtaacatccatctgggtcgatacacagaaaaacttgggacaggtagagtcaactgagtaatctataagctcaatctcctccaaagaagtttttagaatatccttgaaaacagtatcgtcataaattgcatgcttcattagtaaccttgtcccagtgatatggtaataatcacggacgaaaatgcttttgatcatggagtcgtagagtttctggatttgtgaaacatccattttctctaatgctaacagtgatgccaaaagacctccagttgaagtgccacaaattatgtcaaagcattcgtgtagtggtctttctagatgtttgttgagttggtccagaatttcaagagctactactcctttagaacctcctccgtctattgaaaggattctaacccctctgttttcgaattttttctgctcatggtagcctagaatatttagtaacttgtttgaattaaaaattcttcctaaatcttcattcaggcagtgcttttgagtcttccaggaactcattcttatgtccaaaaagtcaatcccattcatggtcaaacctttgtatgtattaaacagagaataatctacatttagattatcctgatttgctacgtttgtagctatagttttcagaaccaaccgtttgtctaccaaaggtctgtatttatgtttttcatcttcacttatattttccaattttataggggatttaacactgcttctgacccgttttaccgaatctataagcctttggtgatctctaatcttggtaaaactccgatttccatccaaatagatcaaatctaccaagaaaccaaaaagcgtcatttgtagtaccttggcgtcttcagggtcatttttactaaatctttctattctttcacttttactacgatctattctagtattaatgtcgtccaaatccacacttatcttgttagattcaggggttgttggatatacaaagctgtacagcatgtttgcgattgatccctttggagagttgacaaagtggtccttgaccatgtttttcaagtttgttagtctgtcgaaaatggttgaaaccttcgcggtcgttccaattttactgtttaaactagttggaagataaggcgtggttaatacattttcagaatcaaactcaaaacaggagtaatttacaatgtcagccagcaaatcaagatccaatgctccgtcaagagtatccattacctcgtcagacttaatggccaatagggcccataactctgtgaatatatcattcagaaccctgaagtcagttgtgaccttcatgatgtccaaaagcctagttgctacagtacccaaacttaattcgtggtgtggctccatgtttatattacacattatatccattttgacctcatctcctccaaccgtggaagtatcagcagttgaaatgttaactgctagtagtcccagctgatatggcgttttggatgagattttagaagatttgagggtaaatttagccaaatcctccaaacctgaaatgttatctaaacgacctaaattaatcctcaaatttctaaaaagaggctcttttgagtccaatgaagtatagtagtagggaatccaaaatagttgtgactttttatctcgtttatcaactttttttgtgtgtttaactggtattaagtagttttcaattgatatgtttgagccgttatcctcactagaggagaacgaaaacattttttcccaagtccagctctcgtccttggaatcaggttccttcgctttcgggggcactagtgtaatcttctcatctaccttgtagcctagggacaagaaaagctcgtctattaaactcttaaactctgattcagactttttttctgaaacgtccttagaatcctttccagaatcctgaggttgaagttggttgtatatgcagtatattttcaggagggtcttcttgagtgactcgttcttagccatctcgttcctgagtttgtcagaaattttagacaaagaaataagaatttttagtaccagctcctgaattgaaagtagttctggcgtttgtaaaggcttgtttggccaaatgtatgtattaactaacttccatatattcttctggtaaggtttctcaagcacacctagaagagttgataaaagacctccttttatgaaacggtctacgaaattacaggaacttacaaacatatttatggagtttaaggcagataactgatttttcaagtccttgtcattcaagttttcaaagattattttctcggctttcttcaaaaccgtgttaaattttaaatcttgataatgtaaagtatcaagttcgtactcaagagttgaatcactcttggtttccaaagatgtatttgaataagttctgaacacattttttggcgatagtctattgaataatgtgttgctggaaaataatctatttttcgaggcggatttattatcttttacacctaaattattagtttttgatcctactgaatataattttattgtttttcgagaaggaattaggtttttatggatttgcttcgaatccctggaaaccatggtttgaatactgaaacttccatttaaatgtctatatacaaatgcttgttgaggtctgatatgcgaagttctccataaatgatgctgaaaactccctaaaccgttcctattcgtggtcttccacatgccaagtgcaggaacttctgacaaatatagtacagcaaggacgataagttgtattttacatttaaaaaggcgtgattccataaacatcaatcattttaaaatagtaagagttttataataacagaaaactgcccgaatgttcccacacatcttccaacatctcacatccaaaaatgaaaaattaaccaaaaattgtaaataaactataaatagactaattaaaatttttctaaaatgtacatatattaaaagaagaatattttaatatttaagtgaattatttagattcttgaggctgagctgaattcacttcttcttcctccgacactgaatagagtcttataataggcttcattggatcctttagtagaacgtactgtccatctggtctcctcataacgaggtgaacaatggcctttattgacccccaagcgttatctaggctgaatcccatctggagtgccaaattttgtgttgtatgtgtatgaattccgatgattgagtgattttcagcatcattgggactccttcttgttacgtaggctagtttaaacactccacacccagccatgttagcacaagcaacaaatctctggagctttgtggtattatttcttatctcatttgctagaagagctcccttctgagtttcaatttgtgacctccaagacttgttattcttgtttggacactcgttgagtgcgcaaacgtaggtgtaagtatccgttccttggagctttgcgtgaacttcacagcgagttattaccagaattggaagcttttcaaagttagttgcatttggcgttcccggcagtgtaaactttctgtacctgtaagctattgtcgctgggttgtcagattcctctacaaatggagggtctaagaaagtttcagaatattcatcctgtaaaagaacctgttgtctcaagttttggttaacttttacagcttcataccttaacgatgacggcctgttaatcttaatttcacaatctggctggggtggatctggagctgtttcattcactgttaacatatcaataattgacccgtttgccttatcaattatgatctggttttcaattttagttacgtttaaatgccaggaatgcttggatctacctgccgtcatcaaaactgacaatatttggtcagttgctgccaaaacaatcttgtcataccttaacagatctctttcaaccttcattgcctggtcataacttgctgaatctccttgaagtggcatgtttcctgcctgcttcttatccccagaatcaaattcatcttctccctccacaccattttgatattcagattcaagtggttttgaaggcgatgttttatacgtttctaacaaaacatctgcaatgcagtcgtcatcgtgtgtagaagtccagtagtaatcgtatgaatttgataagtgtagcaggtacacttcatttttcggggttatttggtccattttcctatcatagattccaagtttgccacgccaaaataggtcttcaactgtgacttgcgaactatccatttcctgtttcaatagaatattgaatggaatctcagccactacattccatgccggtgtcggttcaatactccattcgttcaacgggtgataccttgtgggcaacctcaaagatctattctttgcaatatacttctgacgacgaagatcaggactaaaattttattaacacatttatatacagtatgtagttatatgtgtatagttttataaagtaatatagtaatatatataattatgtatagttatatagtaataattcagtactattgcttttgttttgaaaattgaagctgttcctcttccataaccttctggttaaaagcttgggtggtctgttttattggagtcttcttcttataatgagtagtcggttttattttcacaatagttctgctatctactgtctggaactgtaactcttcatccattgaagtggaattaaccctgtttagtctatttccttccctggcatttctctaaacattaaaatgagttaagaatctcaaatatttattcatagttaatataatgaatttacctggtatgtgctaaacgtaaagtcacaaatatgtatttgcttatccaatttaagtttagggtcaaatgggaatttgttaattgtatgtaagcaggtgttgatggtctggtcatcttcctcgtctggaccccaaccattggagttaaagttagctacaatatttaaattactcattatgtacacaaaccgaatgaaacagtattaaatatgttggaataaatatggaaggataggttatgtagggtattaaggcgacaaggtgaaactataaactaataaaaaattattctgtaaaaaaattaattctgtatttttaattattataaagaaataaatttaaaaaattaatcaaactgttcttgtgttaattttaaaagcctcaaaattgagttcaaacctaacagatatccatggtcaagggagcgcacattgtacgacacatgtgacaagtctatcatgaacacatcatctttatcagattcttccttaacgtcatatacaaagagtaaacttgacccgtacaatgccaaattggtctgactctcgaaaatcctctttaagttttccagcttttctgtaaacttctttgacagggactttttacgttccttatcatctagaacagagaagtataatgtaaataattttacaatttcgccatccgttctagagttgtgggccacgtgttgaggtacaaactctgccatgtttgttgtcctgtcccacttgaacattcccgacaggtgaaatccgtgacttctacaacttcttccctttgcctttgattctttgaactctattacctttgggtctatacagtcatctccataaagcctcgttcccattttaaggtccattacacatggcagtttcatgccatagatcgcgttttttaatctaattgcacaggttttgcccagtttccagttttcgaaaacaaagggctcaaagatcccagaacattctgcgatgtaatcaattatttttaatgaacttttccatccatccgtactttcatttgtatcaacgttttcctcattttcactcacttgtgtaccattagatttatcatcagatgtgtcattatcgtctgattttacagtttcagttaaactttcttgattattagtgtcactttcactatttagtaacaatgtatttttagaacctttatctaaattaaccttgttagtaacggaatttctatcatttacatttttaaatctatttgttagacgaattccagacctgactacattttgaggtccgtttgaaaattgtaatttaaactcttctactggctggttgtatacctttaatggaacaccattctgcttatataaccagataaagaagtcgatttccttctttgaacacaactttatcacctgatcattcttcccatttgtaggcagaaaccactggttcctgtgacctgcagctattacaaaagtgttgtcatctagttcattgggatattgaaaaaatctaatttcagtctcatcataaggcttctcattttcatcgttggcttcatctttaattgaagtttcatttgtataacaagtgctatcattactgatttgagaggtttcttcaagcttatcattagatttacttgaaagcgccagatcctctaaatcttttgccaggtcatacaaatcaagtagatgatacaaattcttacacatcgaaacagtactttcaaaaactccttcatcgtctaattcaggtacgatcttaaccattttgggcacactattggttgtattggaggtataaaatgaatgttcatacttaaccaaagtagcaatcacagcctcaacgtcttgcgatagtctagataaagtgtatccaccttctaatgacagtaataatctgcccttactgtatttctctgcaagctcacataacttgaaggtagcccaagaaaatccttcccaatctaacctacatccacctaaaaggtcacctcttccagagtcaaaacctgccgaaactaagataaactctggctcaaagagctccagtactggaataaccactttgttgaatgagtgaaccaagtctgcgtttgtgaaggacttttcaagaggaatgtttacattgtatttagagcccttgccaactccaatctcatcacaatatcccgtataaggatagaaagaatcttcatctgttccgtatctgtgtaaggatataaaacaaacactgttatcgtcgtagaaaatatcctgagttccatttccgtggtggacatcccagtcaacaatcgcgacccttttcaaaccgaatttatgttgcagatacctagcggctattgcaacattgttatatatacaaaatcccatcatcttgtcaggggtggcatggtggcccggcggacgaaccagagcaaatccctttctaattctggtgggataaagcaaatttagcccagagtctgaaccatatgggtcagaatcattttcctctccttttccatcaggattttgacttaaatactgttctgtgtgttgagatgaatttgggttagaattaggctccgttttaacagtctgtgtttcagtttttgtatcgctcagtgtagacttcattattaagttacacagttctacaaggcttccaactgccaaatttgcaactagttctgattttggcgtcatgtaagtatcaacatccaatggatacaaactttgaaacttttttgaggatgtgtaagcgcgcttccctttagatgatgagttaagcttagataattgaccagtccagaaggatacttggtctagatacttttctgtgtgacaaagcagaagaatctgcctgggaacctctctgggttgaacgtgatacaaatgtccagttaaaggtaactcatgttcgaattttaaggatatttttgcttcattgagcctttctaaaattgatgataatcttttgtgtgattctacatgatcttggttcatatcatcgtgatatcttgaggccatgtgttcctcgtcgtacgaaacagccacaagctttttcggggaagataactccgacattttaaatatatattaaacaaatgcgatgaatcatatttttagtgcgattaactaactaattatggagtaatgggaaaaaatatggtgtaaactattgtgtaaggttcctcagacaaaaaattaaaatatcccagtcagggaatcgtgaaacagtaaagaagctattcctaaagagatgaattaataaaaaatcgcttgtttagatgggatacctaggtaatattctcttgatcctcgatctctaaaccaaatcggcacccttaaattttccaaactagtcttcactttaatattttcatctaacaatagtatgaaagatgaatggcatggagtaactttatttttatgtagttaaatataaaatgtgtaaggtattacccttcaggtgttccaaacaaatatgtaagctattcataaactgacttaattttacacatccaactccagtatctaccaagcctatattgaatcagtttattacgtatttacccttagatgttatgaatcccattaactttcttgaatttaccatcccttggtggtttaattgatccaaagtagactgaacaactgcttgatttagttgttttgaattcatagcctctaacatgttctttaaatttgacattttatattctctgtgaaatggttcttttactctcatataacctctaatttcctgattttttctccagaaaatcgccttgaatgcctctgaatcgaccgtatttaaatcattgaactcaacttcatacaatcttgtcaaaaagttaagcgatcctttggaagattctagcttaacagttacataatagtcttcatttattgtttttttaaattcttccagattattccgattaagtaacttgtttaacaatctttggacataaagattatgagagttgttgcaaaagtaactaagtctaagtacttttaaactcttttctcctggttcgtgatataaccctaaaataacttattaattagttgagccaacctgaacaaagcgaggttaacagaagatgcctgctcttgaacaaacactgctgagttgttttcaggtttgaaacaggtaggtctggagaaaagttaaccttctgctcctccaaatttactggtaatacaaatgcgttgtctactcccaggaatgaataattcactctcttgtttgcaggcctcattgcatacttcatagactcagttctacaaataatttgtacaataaattgatgggactaattgataaaataggatattaagatagtctaatgaaaaaactagtataaaaaatacttgaacaggtttttgtagtaaagttgtcctaattctgtttctgggaaatcatgagggaatgagggaatctggaaatggttcatcaagtgccttctttcatccaatcctatacttaacccaccaaatcgattaagtaatctaaaaaattattatttttaatattaaaattatgtatattttacatccaaagcttgtttgagttactgtttggtggtatcagtaaatctactccacaagggtccgaattcctgaatattaccaatattggtattttagccgattgcatcttttcatccacttcctcctctttgatatcaccaattcgagtgatatcaacattttctatcttgtttgtggtattattaggatgcttcatagagtctaataatttatctataagtttggaataatcttttcttttcctatttcttggtaagggattcccgtttaacactttattttcagatttatgatcataaaatcttaatctttctatatttaaatcttctttctcttgttcatttagagggagttgaacttttaacttctcattcgcacatcttgcttttgataaatcaaatggtattctagtaccaaatacctggggtactgtaattgaaagaggtaatacaaaagaatgacaattaattccgtgtatgggtgaacccgtactagtatcaacagaaatcgatgaccatagcctgttggatactgaatagttggggtcaacttttaaaactttttttaataacaatagtgaaagtggcccaaaaagctcaaattttaccaaattatcaacctaaaactaattataaatataaatttttacattttgaactttcaaattttcatcctttaacaatatattgtacagctctaattttgagattggatgaacaaataaccaaattgtccttacttgacctgaataattctattttttagatagttaataccttttgggggcaaccaaatgtaatttacaggggctatcaaattcgttaacatattctgatttggattatcatctgactcacaatctccatggtctgagtaacagaatgatgttcctctggtagcaccagtggtataaatgtcttggaacataagaaaagagtcagaaaaaacatttttaaatgttttcttcatttggtccaagtcaccagagactgatataacctccacgtaggacctatcgtgaataacacatttatgcttcaaataacgtaaaaaacgtcgttttgatttctgagttggtgtaatcgccaacctgtaaccccaaacactatccattttaaacctttttgcatgatataaatgtgtttcaagccacttattcctgctacatctttgttgatattcttctaatctattcagctttcgtctcctatcctttctaatcctcttagaaacctgttttagatttagaaaatgtacttagttatagaaatttttaataaatttaaacaaattagatataataaataagtatctagtacttttggagtgtttttagccatttctctgagaatgtgcgcccggatattcttaggaatcttgaaaggattgtgagacatggctcttcttctcatcacaaagggtagtttttggaaaattcgctgctgtctgtcatttttcttaagtaaagtgaagacttcttctatctcctgggcccgagattgaacaaatttcttcacatttatgatatccaactttttaacatctcccggattctttccggagaacaactgaggattctcaccagaatccatccctttaaactattttacaaaagctaaaacatttttatggaaaaataataaaaaataattattcctacctacccaccagtggaaaagaaactgactttcgcctcaaagaatccaccataattttctcaatttatcaattttcaaacagaatatttttaaatttaaacctcgtgtaaattagttttgactaaaattaaaatgaaatcatttccgttgtatactatgtgtataaaatgaaatgaaccaagatgttcacataaagctgaaatttcaaattatcgcaatatttgccatttgtaccatagactgtataatattaaacaagaatcctgtacgtttttaattatcgaataattttaacttagatacatgagggattcattacacatcattttggaaatgactataaaaccttccaactgagggattccttaatagtggaaccaccttttgacccgggaggaatcatagtgcaaaaggaacactttagagatttaaagaatgtattctttttcaacgtcgcacataaacttaaggaaggaaggaagctgcttgacttatttacagtgcctgtaagtaaacaaaaactggcattagaacatttaaactcatattttactagtaatttttctaccaaaagtaaagaattggctgagatcgcgtcggactttgaaaaatcaaaatgtgaaataaaggaaacagtgaggaaaattggagatgtctttctttcagaaattgaggataaatttgaatatgtagaaaatattactgatctcgaggttctaaataggcaggttgaacttttatatggagctgatttaatggcctcatacattcttctgtttactccaaggtgtgttagaagtcttctatataagtacatttggagtgatcatgcctttatagactctgataaggagtatctgtgttgtaactgggtggttaacggaggagttcatgacactgaactgcataaaaactttagtttagatgaacttacaaatgaggatttggtagatataataaggttacataaaaattatttaaaatttgtgaaagtaaggtcccggaaagttttgaggactttggataggaaatcactgatttcaatttttcaaactatactaatgaaaacggtttgggcacactatattcatgaaccttcaaatatatcaatagagaataagaaggataagaaagaagaggctagtgataaaggtgaaagtttaagattcgatagagaagaggaagaggaggatgaagaatttggcgggaagggacatttggatagtatatataattggataatgaagtataaaaatagaccaaatattgacataaaacgaatacgatatattgagaataacgaatctaacagtttgaaagatacattaaaaacactaggcaaactgttaactgcgactaaagaaaacctcagcaaaattaacaagtctctgtataaccactacaagagaatgagaaaacgtaaaataaaagaaatagactttgaaacatatgtgaaggaggaagctaaaagagaaaccgaagagataaaggattcgatagaagtacttataaattattacaaggaaaatttggatggcctgagtggattgtacgggagaataaaaaaagaggaaaatgttaagttcatgaataacttgatagaatacgaaaaatatgacctgctgaatctactattgatatatttaccagcgttgcctgaacttaaacaaatcacagataaacaggtctacctaaactatgtgaccctgagtaaggtaacattggttaaattagtctatctagcaatgatcagaacaagcccagtatatgtgccatttattaaccactattattcactaatagatagtgaggaaactgatattgatgagactaaattagctaaggaacgggaagagattttaaagaaacacgctgagaaccctaccaccattgatgacaccttggtgtttgagttggaagaaattgatacagtaattaataaactaagtgaagtggatccgctgagtgggaagaaaactgtaaacctgagaaagatgaagttagatgataatgtaagggaagtagtactattgggtactggaagaactgaacaagtgactaaatcgatcctaaaacacccaccacactttcaaattgtactaaagctgttaagtaagaaaacttattcgaatgatgctttaaaagaaaatttggactatcttaaacaaaattatggaaatcgagcccaagtccgtgtcaacgctgaggatgaaaattatcaacccagatcatctgaatctgaagagttgaagaaaataataaggagtaaaagacttgaaaatgtgctgagccttttaaacaaagatgaattagaccaactttattctcagtttctaaaatacatttacccgttcagtattgttagtaaggaggatttaggtgcagatttagatgaagtgctaggtcaacgagtgttaggagatgagttactgggagatgagaattttcatatagtatataatagtgatctactaaatgttatgaagggtgatattaagtcagaacaagacgtgattgggatcatgaaaaactacttaatctcaatcaaaaatagagtttgtgatactgttaaagactcagtgctatcatttctatcatgctctaatccagattctgaagagaagataaaggaattatcagaaaagagcgatgttgaagtgataaatgaattcaagaaacatttaaatgatatggaacaagatccaaataatttgagaattgaatataaagtatcacaggattctaaaccaaaagatagttactttaaaaggactaaaaacgtgtttaccattttaccaacaaaatctaagagagataattatagactaagagactctaaactgtatagtacagaggaagatattatgttcataaaacagccattttcagacattgatgatgaaattggtactgttaacacagttggtggtgagagggtggtatttaagaggaagaaagaagaaccttcaattgatgatatgtacaagtttattttgtctagaaacatgactaatgcccagcgaaataggatagaaaagttaaattttagtgaaaacgcaattgaaaactggacaaaactggggctgaataaaacgatggcaatctcagcgttatcatacctttcacataactatgggaatagtcttgataacatggtgtttaagccgagtcttatacagaaattaggtattgaagaggttttgaataaaagtagaaagaatctggtaatttcaggagcagttgggggtggcaaaaccttgacatacttactgccaatactacaaagattaaaagaggatgagttaactaagttgagagaaccctcatcaccgagatgtttaattataactccaacgacagagttgtgttcagaaatattcactgcggtaaagaaactatcacatctggtgaagataactgggttgcaagtctcaaaaggagtcaacagtaaaactataaaggataaacttaaaggattagtagatgtggtagttgcaacgccgtcgagattactaaaatttaggaaacatttaaaattcaataagcttaaatacgtggtgttggaagagtcagactgtttgtttaatgagggtttcttcccattagtctacacaattttacagcagataccaaattactcacatatcaataaagaaaagagcgctgaaactcaaatcatacaagtggcttcaaatatcaattatttgaagttctttgaatccatacataagtcattcacaaagtttgtcaacaaatccactagtgatagtggcaccagtaatagtactgatgctaatgaagaaaaggatgtggaaaggataaatttggtaaagttgtttggaaaacataagaagagacttgagttgtatgaacacattgttagttactactttaaaccgctggaaaatgaacgcaaaaccagtaaccgttcaaatgtcaggaacaatatgtttgactataataaaaggataattgaggacctgattaacagccataaggttgtggatgaagttggaattaccagaccatcgaaaggagtaaaacacatgtttataccagtggaaaaggataaagttagaacactaatcaatattcttaaatatgatataaagtacccaataaccaaggattcaactggtactacgaacaatgatatagatgaaacatccaataattcatccataaaaaggaagaaaataattgtattttgtaggaaagttgacgcagttagagctgtagatcattatttaacagagtcagggtttgccccaatgtcagttcatagtaaaatgccatttgagaaaagacaagctaatttcaagaaattcggagaagctaataatgcaatactagtaacaacagaattaatgagtcgaggacttaacttggatgttgatattgtgatcctatttgacttcccattaaacccaaatgaatacatacgaaaatcatcacttctaatgcattctcctctgttatacacactcactacagaaaaatcacatgattttagtcaatatagttcaaataataattttttggaaaatttgaaccagggtgataattccgttgttacgggtagacagtttgcaaattgttgggatactcaatttgattatatgactcccagtaaccttttgattgcagagaaaaggtgtataggcctaattgataagaaggatcaagtgttgagtgaagcaataaaaagaagtttaagtattgattacttcccaataaatagactaagttccaggaaaaaggattataaccagattacaggaaccctcaagtatttaacccaagcaggaggatattttaagttcatgaaccacttacgtaaattgcaagttaaaggcacgtttaatccagaggatatgtacaaatatctggatgatttcagaataatagtaaaggaacagtttgttaacagttttaagaaggtgaagctgaggcgtttgaaaatttgtaagaggaggagagaactgatgaggaaacttaagatgttgaagaaatggaataaagcaatcaggttaaaacagagaataatctcagaaattgaccgtaagaagaggacaaaggattacatttacgtcaactttacaaaggatgagaggagttgcccaccactaaagctaaaggagataaagaaagtacgctttgaaatccttaaactaaagcttcttaaaggttcaaattctgaaaaactactcaaaagatcactaaaccagatccttaaattcattaatagactccaaatcaagttaattaatcacagacgtctaacccaagatgaaacccaagaagctgaacctgtacctgaagctgaacttagatttaagtttattgaaattgcgaaaagtgataacattgataaaaaggtcaaaagaatatgttctttaatataatataccaaactaacagttatacacagatttattgtatattactatatgtactatattttgtatactatgtatatgtatagtggtgtaagtatatcagcgagtataatacttatagtacgcatggtatatttagtatagaaaacaaactggagcaattaaattaataattaacacaataaaaatcattttaatgttaaattaaaaagatcaggccataatttgtgtaggtttggaggtgaagaaatccctgttagtgtaggtgttttcgctggaaacagactttagtttactgaggtccaaatcgaagctttgttggtcatcttcattaatttgagggtagttatgatcaaagttcattgagttcatgtcattagtgagaaagtcgagctcctggacaagttcaagatcatcgatctcgtaactacgagttatcatgcccaatctctcagaaatttcttccaaattacgcttatcagactccataaacgagtcgaagtctttcctattcaactccttacttatttcagaaagtaatttattgccaatctccaaattacgaattgactcaacttggaactaataaatattcagataatttggatcaaattgaaaacacaattgtatgtaaatataatataactaataacaattgtatgtgtaaataaaaggtacatttgcggattcagtatcggaaatgagttgtaatattttgaagcatagttcatcgaggattgaaagttgctttgaaaccagagcttttctcttaagaacaaagagcgcgttggttctatcgttttctttaacgtattttagacacatatcattgaattttgataatcgatcctggagcgactctcttttctccagaagtccatctaaaaatagaatcgttaaaattatcaaaagataacaaaagataaggtagaaattaaaaaaattagtaactggataataaagaacatgtagaagatgatatgtaaaatttaaatgtgtaaatacctcttaaggatttaagcttgatcattttggaactgtaggtggttttaggcttcctaaagcatacaaaaagtctagaaaatcccatcgtataaccgagagaaaaattatgatacaaaaaaataatgatcgttatctacaacaatagtgtggtttaacactatcacctgtgaaaattcagtgaatataaaaaatggcggagaagaagcccctgagtgaagtgtacaaaaatgtagtttgtaagttttaaagtcaaattaaaagattctttagattctgtgccggatttatactcctacaatgatatccaaaaactaatggacttaaatatccgagcggtaagaaataatcaatggaatacaaaatttttaatttaggcatttaaagaaattggcttaaagattgataataaagtcatttactttagaattttcctctatttagtcatgaacgcactcggggcctacatcaccttctttgttcaagtagaaaagtcaaaatttttactaaaagttatgttggtaagttaaataatcattattttcttgattagattgtttttttctctgtattttccctctatatcgcctacgataaggttcttttaagaagggcgcattttgtcgtaaaactcaaagtaaccttcgttctctcattattataactttagaactgtaaagtattagtgtggacaaaggttaaaaggttaaaaggaacttatgagatcagtacgtcatgccatagtagaccatagaatataactaaatgtgtatacaaattaattaaaaattagaatataaaaagggaggtttgaagaataaagctgaaacctacacattaccactgggcgatttgtttttctcagacggagagtgcgattacgatcattttgtaaaattaatggagaagctcaaaccgaggcttctcagtcttgatacaagatctaagaaaaaggactaattttttatacattttatacacttcattttttcgtaatattggtagtacttaactctttagttttcgttttctggaaggttttggcgctaaataatagtataaaggtatgaaattacctctgggatttcctctagagtagaaagtttgtagcagatttactgactcttctgatagtaaacctccacaacactttatagtaggtagatcaccattcctaaatataactttacttaactgaatgattggaggaatgaataaaaacatacgataagtgtaacgataaaacggaaccacaaccaccaaacttttcatttttacatccataatacacttcagtcaaaccttaaaatagttattttagtgtaaaaagtgtaaaactaattaaaatataagtaactaagagggagtaaaaagaaaataccaatgagttgaagtgctgtggtacacataatacaaggttcacaggtaacaaacagaacaaatcctgaacaaaactctctaagtttcccagaatcttgttgtgacttgtaaccgtttggttccatgtcaattaacttatttatggcctcaagttcacagtgccaagtggactaaaatattaagttcgatggataaaaattacattatatgtcaagtttgtagcgtttgacgaagaagccactacctctctggtagccttagaaactatgatacaggcaactgcaacttcctccttatccagagcttttttggcctaataaatataaaacagataaaaatcacctcttcaagagccaatttcataaaattttctatttcatcctctgtaaactcctccatcacctcaaacaaatatgaatcgtgctaaaaatcaaaaaaaagtcaagcaaaatttaaattatggataaaaataaatataaaaaattatattaagcatgtttacaaagtattaaataaatgtgtaaaattttcaatatgaccaggcaagaatccaatttgcacatttcaaaatagaatctttcattgcctacaaattttttacagttttatataaaatagttataaatatagtatataaatgggtagtttggtacttgtagttctagctttgaagcgtttggttttttcatgtaaaaatgcgatgaagcttctttgaagacctcaagtactatgtcaactcctctgtgaaatgttgttagaagatactgttcccggtgattctctgtgttgtgttctgaaggcattaacctgaaatccgtctggttattcattagagttttaagcttttttggcatctcatttattacataatcaaacatatttatccccttgtgtttattcttgacaatattataacgattagcctttgctgaagaaatgaaattgcttatcatttcttctgtgacagaatcagacttcagaacttgatcaataaggtttgtcctgtttgactccaataaaagagtaggaattgatagcttcgtcaacttttcaaggtctacatgagtgctatcatacaatataagggattgtaaaacctttgaaaggggttttaccaagttaacttcttttgcttttttagcctcctgatgactttgaaccaattttatattctccaaaccgttcaaaaggtcttcaattattggcactgattgcctcctcatcaattcttccattctttcagtgctaaatcgctcaattaactgatccattttcttccccacctcttcatttttcttcactttactattatctgagaaattagaatactttgatatagtgttcaacattgaattgttaatgtaattaatgattaaattggcttgatcacctagtgcaacgaatgaaatacggtcaactttgtaagcactttgaacaagcttaagtaatctgttcaagagtacaaagtaccattcgtctccttgatttattatgggaatatcagggacaaagactagtcccttggaatttatagctatttcatcggctaagtatcttatgttctggtctctgtaaccggcctgatttgggagtaaaatcgtgcctataaaaaagtcaccttcaagtggaattttctcaactgtctgtccaatacaaatatcatagttacgcctaaaagctattgagtcatttactaccacagaacccacttcatcaaactttataaactcctttggaactgaaacatacactctcaagttatcctctaaacttcccattgaattcttatccgtaccaactttaacagggtttctatcatctattgtgaaaatagggttgttctgatcattttctgccatttttaaaacaatttcaggatatttagaagattcatatttgtcgatatcatttaacaaatcattgtgtttatattctttaatgtacaaatcctttgactcacttgaatttttagctattttgtcagtagaaccgtcaaacgctggcgaatttgaatcaaaaagccctacacatatttgtaattataaaaattacctgtggttgagattggagagtctgagaaaacggccctgaaatcagtgacaaactcttctggcgcattctcagtatagtatttctgtgccttttcaagcttatttagtgagtcattgtaggaatttatctcgtctttaacccaatttttaagaggaacttccaagaaatacctgcacatttcatcctcaagaactacatccgcagagtcttcctggaactcttttccaaacccaaactcatcttccccttcaaatttctcatagtattccctctcaaccgtatcgtctggctgattattagttagtaaagagtttaacttaatatcatcctcaggcgagtctgtgctagttataccacaaatacgattatgctcttccctattctttttagccttgtctaaaatttcctgcaaagtgtgagtattttgggattcggtatccagaaaagtttcaccaacttcgtaaacgcggcctaaacaacggtctgaccttggggtatcagggaggtaattacggatcccaacggggtccaaattcttgtaaatggtgttcatactgggaattttagtctcatagtactcagtcatcaactcctcatccgaagaatccataggcacatcttcaaaccagtcatatttcctgaggtcatccttatctccttccctctttaatatctcagattgagcagaaatcagtgatgataattcctcgtttatatcagctcggtcggtactaactataccctcggaaggagagttattgtcagtagtttcatttgaagggttatttggtgtagaatcacttggagtggagtgatagtgttgattgaattttgttaaacaaggcgaaatatagcccaaattaacacttctgatgagtggaattctcaactttatagacgatttctttaaatgtgtaatacattctgaagaattatgcgatgaaattaaaccataaccaagtgataaaagtaaggaattattaatgttcatttagaattcatcaaagaaaattcttcatccttccaacaatttttaacaataaactatcatagttttaaattatttaaaataatgtacatgttatcaacaaatgtgtagattatacaaaatattattattggaatccaaaattgtgtgacacaatcttaaattttaaaatttctaaaattaatttttaatgggcaaattaataaaaaatgtaacggaaaatgtttataatgtcattcctaaaccttctaaaccttttgtagatattaaacgtattaaagtatgatttttacacattaacactttgaaatcatacctttattagttatatatagaataatattagtaataatatattcattatttatattgatgataataatttaaacttagtgcattggaggaaagggaggtgacggggctttggccttttctaaacatggtccgcaccatctactaggtcctggtctcccagtaggcggaagaggtggaaatggaggcagcgtttatgctgaacctatcaagaaattgaatgaaagatctgatttcagcactattccatcagttgtaaccgccaaacatggctcaacaggcaaagtattacattaaatcctctgtatactgcatacaacacatagattacacatctaataatctatagggtaatagaattaggggaaataatggagaggatataatattaaaaatgcctattggtagtctgatatataaatttgaaccttttggcgatttggagaattggaggaatttgtgcgataactggaccaaaaccttaatcgcagattttgactcaactgtaccaattttattccattaaacatttaaaaatggtttaggagtgtgaaagagtattactggcttctggaggattaggtggtttgggtaacaattttaggtactttaaaccttgaacatttagtttagaacaccttacgaatcggaatttggcaccgaacctgaagaaaactactacgtacaactcaaataatcttattaaactttaggaattacaactaaaattaatcgccgatgttggcttattagggttaccaaatgttggaaaatcaacacttttctcaacagtatcttctaaattacattagtaaatgaagaaattgatattattctagataactcgatgtgtgagtaaagttggtaactatccattcacaaccttgtcaccctatgttggatatataaaatttaatgatggtagttgaattttgagtatttagtgatttattaggatttgatttaagtatcgtggatttgcctggaatcatagattgtggaaaagaaaacttgttcctaggtcatcttgagcgtgtcagactaattttatatgtaattgatccctgtaatccaacacacaactgtatagataattttaacactctcaggtatccatttagattttataaactattttagggaaaaattaattggatttaatttggctgaaaagcccttcataatagtaacgtctaagatggacgttgcatgtaaattatcttgtcaaagaactgacgaactacaacaatacgtatgtaattattaattaacctttaatttagctgttttctattggaattaatgccccaattataccaatcagtgcaaagtataacatgggcctagaaagtaacacctgataaacacaaaattaatataggcttggtgaaaacaatgcgaaaatcactagaataatgtatattaaccgattatactataattaacagggtacaagtagagataaattagaaaaaattattcaagatagtccttaatagaatcttggacgacttggggtagagtatcgtattcaagtttccacaagcaagtgcactctttgctcttatatcccttgctcccgctcttgctatgcttgttgcagatgttatagtactgatcatagtagtctgtgagtggtgtgggaaactttagagggtcaaaccggagctttgactgcttgaaaatcttacacccagaggggattgggtattgaatatgttggatgtgggtcctatgaggagagtcaactggtacaaacaaatgataattttggctaaacaagtcagacaagagaagattttggagttttctgtatccaaaagatagtggattaagttccctgttaaactggagcataaattgttgtttaagctgggctagaaccaggccgtttttcctgttatccacgagcagagaaacgattttaagcacctcgtttatgcaagtacaaactggatatcttgactttttaagctttggaaacaactcctgggcagttttttcacaagctgaaaccggcaataaaatccgctgagtgtatacgaagattccagagtatatggccagctgcaccaggtgaaccacctcaccaagtctcatgtccctgaaggcttcaacttcattctttagtctttctgcgaaagcatatctgcctccgttaaagtccttgtcgtccttaaccttatcattattgttagtcagaattgatgaggcgaagatgttcagctggcgccagtagtaatcgtcgtagctgttgatggtggagtgagtatccacaaagcctttaaagtcacttggttccttaatcaagtaaaccacccagcccatctcacctttaaccctcagctcaatgttcagcttcactgtgttcttgcagtggagggacacataggcaacctcagctgcactccaaaagttgtcacaaatcgatctcttcatctgatttgccacatcgcctacaaatttatgaaagaattttcaatattaaatactaaattattactaattaattaaatactaaattattactaattaattaaatactaaattattactaattaatattatagtgaatgaattaatacctaggtaaggtttaatgccttccctgtataagaattgtactgactcaatcaagcacttttcgaggttagtaaaaaagttcatgagggcaagtttgttactttgaagacttgtgataatgtgttttagccaagtgttttcaatttggggaagtaaattgccgttacttgttctgatccagctgagaccacctcttctctcggctattccaatcatcccttggtgaatgtcttctctgtagtacaactgctgccgtatgtactgctcagtgatcatttgttcagtatcatactgttccctcctgtcatattgatcttttctctcataagggtccctcctttcgaagccatcccttatctgcagatctcttttatccatagcatccctccttgtggcgttgttaacgattaattgttgtagtttttcaataagcttgtcattcttaatggtttccggtcttttaaagtatttcaacctattgtcaaatttaaacatcctctcatcaggttttgttcttttgtagccaatttgagcgtcatagcacatacgatcagtcaccaaagctgtttctgcagtgttatacctgctaaactcccttccatccagttctataccagttttaacctccgcattagggaacatttcaccaacattgtcagccctgaaggtgttttccctaaatgtgctggcgttggtgctagccttactttcgggtattatgttagccctgttgttggctataatctccttaatgatcttggaaatgtcaacattatccagttctacctttttttctgtgcttttttcttcagtagtggagttgattacctgagatgcaggctcatcctgtttttcagtactggaatcagataccttggtttctggtgaaacatccttatcgggtgtgttggtgttggtaacaatagtattgttgagttttttatcagctgcattgcaatctggcaccttagtttcaggcacattctgtttatcagcattggaattgactgccttggtttcaggcatgttatttttatcagagttatcttttgaggagttggtagtactaatattggacctattgtgggtagtattagtggcataactcttcttttcagagttaactcttttaaaggttgaattactcttcttgtcagtactattctcctttaaagagtgggtagtattctccttatttagtgtattactcttaactgcattggttagcttaatttcaggtgtgttgttactcttcgcatcagtattgtttacattagcattagtgttatatacattagtattagtgttacatacattagtattagcagtgttcaccttaatttcaggtgaaatgttattcatttgattgtgttgcggactatcatggtcaactacattaacagtattatccttgtcaactgtgttactagtgttaacagtattatgaacattgctgggtgtgtaacgagaattcttaagtgtgttgtgagagttcttatgtgtattaatcttctgtgtatcaagattcttaggatccatttttgactcctgttttaataaaaatgtttcatttttagtttaatctagagtttgaaatctactgcattcaataggtcaaaatctgtacagaacgataaaagcagaggaatattttatactaacgggcggaatcccttccaaagagttttaagggtaatatattacaggttagttcagtttaccagaactagcgggaatttttattattttacaaaaattttaacaggtaaatttcttcaacttagaatctacaaataaacatattcttaataagaataatattaatgtgtaataataaataacacttttgaaatatttaaaaaatgtacaaggcaaagtttctcaatcttccacaacaatccactctaaaacagcaacacccacaaaaactaacatacctacacatttgaagaaaacacgtcacaaaaacacctttttagacgacaattttttacgaaacataaaataaataaaatgaactaaccttttcagaaattctattgtctaaatcgttccttattctgagaatcctcggcgccttattgaacggaaaatttttaatctatttaatagaataaacttagtaaaactatcaaaaccaatatccttatttaaacttcaattatttgatttttatttttgaaaattttccgaaatttaattgatcagatcaatttccaaaaaaatatactcgataatactttcttatttatttttaaacgttaacatcttattcagttattgaaaataatagaaaattctaattttaaacaaattaatgtccaatgtgtgtgcttgaatcttcagaaaagattttatgtttagagaaagatcctctgattcgtttaaaagacaattaaatgtaatattattggtaggattatccttgaattttaatcagattgtggttttggggcaattttaaatttatttttatttttattaggaaagttgcctaatccttttaaccttgttagtaaataacttgtgctaaaattgcaaatattaaagtctaaatcgctttgaatacaaaatgggagtgaattaaagattaagaataaaaacagcatataattattcaaccgagctgtgtgtcgaagtcaacaattaatagaggaattgactagttcagactctggcaaaagtggccaggtgcctctatgattataaaaaaatgggaaaaaaggtataaaaaagttaaattttacaaatttaaactgacacaaattttagatctaaaaattcgattccactacacaaatggtaataaacatagtaggactcatttcaacattcttatacattaacaccatttttgcccaaaagttaaatccttttatttataacaatcaagataactcccttaaactttacggattaggtaacaattgcttatatgtccaaaaataattttacacacatttgtaaaaaagtttatagaatatttgggacttggttataacataaaagaatcttcgccttttggaaatgatgaagatgacccaattgacttggcctacaaagaacccgttatttcatttgagaacgctaccagtttagttggaaaaggagccgaaatcaatttaccacttggcgtatggatccgaaatgaatcactctgttatagaacttcttcggtactcttctatacttaatcctacaattaatcatatattatagcatgaaatattttataaaatgcgtataaagtcataggtgataaagtcagaaggtgaaaaggttgactctaggatatttaccgaggatataaagataaatatggtaaattatgaacataaactcgaaaataagagcttgaacaaattattaacaaaaaataacctaagtattaaaaaaattaactgctcaatacataccagtggaatgattatctcatatcagtggtatttttgctttatttagactcagtgggtaaatttaatgattaaataaacgttataggaaacttaaaaaatcaatttcaatacttttgaatgacatacaaaataagctggtcaaagactctggacacacatcgaatagtaatccacaaaaaaatcaaaaaaatatcgagaaagattggtacaatatatttaatacttatggtactcatgtgttgacgaagataacattagggggtaagataatagagataaatgccgtcgaaggaggtcaaaatatcaccgaaaatactagcatattcggaagtaaactcgatataaacttttttaagatgagcttaaattctaattctaaagacaagttgcacgatttggacaaaaataagagcgaaaaaattatcattttaggaggtaacgccatgactacggatagaaaaacgactaataataatggagaaataaattatgacaaaaaattggataaacaaaaatgggttgaaacgattaagtataatcctgtgccaattaaatttgaactgactccactctcgtattttatttatcaaaatttttccgatgaaaatttagtcaactcatttcattattttcttaaacagtatttgaattaatttcatgacacttttatatataaatattgaatcattcgagtacataattttttggacgagtatcttttagttttgtattaataatgtataatttttttattatatttacctttttatttaataaaaattccgtaactgctaacccactactcaatcaaaaagagggtaatgagttaaatttaatatttaaccattacagcggaatgattaataacctaggttagaaataacagttataatgtgcacgtttagagtatctcggtagcggatacagttttgacagtctggaacaaagagttaataattttaaggccccaattgttgaaacgaacagaacagtatttgggggtaatttgttaaaagaacaaaattacgatttgattaatgtacaaaatcaatttatatgtgatatttcaactgaggtattatccatttaatatacatacacttgtacatgtgtataggagttgaatatagaaaatgaagatgaacttgaaagaagattattcacacacgttaacgataaatacgaggattcatatagcggatataataacgatgagtatacgcacgacgacatgttacataacctgaataaacacaacaaattacttattaagtcctacaaatgtatagtatataaggctaatttaacatctttaaattttttaaaaaacaaaaataatgacgaaattgggctaaattttaatggcatgctcattttgaacgtgttgaaaaagcttaataaaaattgtaattctgaatttgataatcaaaaatgccctatttctatgttcaggaatgacccgtttgatgccaactgtatcagatgtataatgccctggatggaattttttaaagactatgggacctttatgacaaaagaaataaccatgggtatttttagtcattttatatttattataactattaacttaggcggagtgattaacaaattttataacataaaaaagtatgaggggagtatgcgtaaggaatataaaaagaaaacaattaagcaatcaagtacctttttccatctttctaagagcaggagtgagagccttaatgaaaagaaatccggtgaaacaaacaaagaggaacttgaggaactttatacactaacaattggtcctgaaccacctggaaatgtatcgaattcaaaagtaatatcagattggctagaaaaggtcgtccacaatccaactccaatcgatttagaacttgttccaataaaacaaattatacccgaaaagtatttaaaaatctatgaaaatgccttaaaatattatcaagaattaaataacattaaggatttaaatagcgtcaacgctgttaatagtgtaattaacacggttagtttacaattattctacatagtttattaatgaacagttgaggagaggaaatgcagtggtgagaacaatgaatgaggatataaagaatgtaaaggtatgtggttctgatgacaaggtaatgtttgggttttgtatgtcactggggaagaacggtgatttaaaacaagtccaactcttgagcaacaggatgtaagttttgactcaattaaatctttagaaacgtgtgtttgtttacaaaaactgtatcgagagtattaacctggtcaatgtgtgctcactataatgaacaaataagtgactttaaacaactaattttaaggccaaattattacctattcaaggtaacctctgtgcattagatttgttttaggaactgagatgtccaagaaatatgaagatttttcttgggataaagattagcgttaaggagccaattgcaattgagttgtgccaatcaagtacttttaaactttgtttaacaattgttagaagagtcatcatgtactggtagcgaaagacccaatgaatttgtatgggttttatgtgttcctcaaactgcaaatacagcggtattttcagaccacaaagtcatgattagttagtgaaaagtttaataaaaactggagaaaaacatgttgaaaatggatgtccaaacaaatacaaaatgttatacggtaaattacaattataattacaatgtttaggacttaaatttcttttttctggtgatgaagttggattaaagctggaaagttgtaataaattttacaacaaatgtgatattaactgtaatcattgcacatttgtagcttcaattattacttgctcactaatttaatattatatacctcttaataagtggtacttaatatgttatacactgagtctattccttataataaattagataatataaaatgataatttatgtgtatttatttatattaacggctttttgtgctataaaaatagacgaaggatccaagaatggtaatgttactctataactaatccttattagatgtaattaagaagattaacaagaacaaaaagatcccttcattaggttgggttttataagtccaatttgataatctgatattataatttgtttagaatatcttggctgtggatatgatattctgtttggaaatcctctgagtgaccctgaccttttagtggatccagggttcagagaccctataatctcatattcaatcatgttcaagaaggaaaaattattcaagaaaatctcatactcaaacataacaaatgcctggataagacccctcatcgagtgtaaacgctccaactcagtaacctttcaatattaaatatagttaacaaatacattagtgtgtagagatcagtggttgatagtatggagaagtataaagatataatatcagtggatagtgacattggagtatcaagtatagatgaaagtgcaaagtttagtttatcgacaaattactctgaaattagcgatttactaaagaataacgataataaactttatgttgataaatcctactgtttcctactagaagctgctctaccaatacataactcattgtaaatatatataaaattaatttattcatcagaaagatgaccagatcgtttgcaactgcaatgagtaaattgactagagattttaaaaaacatacaaaagactgtaatgctataaaatactcaataaataaaaataacaaagattgtaaggagataaaaaactggatggagctctttgatcaatttggaactcacttttcatataatattaaactaggtacaaattattcacacatatattaatcttgtgtgtattgggttatgtataggcggccgtattacgtttataacacaggaagaagggtcgaaagatgaaagggggaatgaaaagtcagtagatgttggagttggaggtaaatttgaaaaggataataaaggtgttggaattgaaggaaatgttaaatttgtttttggtaataaaagaggtgaaagtaaaaatctttcctttaagtatacgaatattctgggaggtttacctgtaagtgatattagtaaggaatctgagtatgttaaatggatcaaaagtgtgtataaatatccaatgccaatcaggacgcaatttgctccgatttcaaaaattttcaagtctaaagctctcaaagactcatatgatgaagcttttagattctatttaaacacaagtatgataataattatgtaaatttctatagaaggcatttcaacaacacatggggaacaacaaaaataagatattaataattccacaattttataatcttaactataatgtttagtcgtagaatattgtttaatgttagtaatataaaaaattctttggaatccacagttatttacaggtcatttgttccaaagcttagtaaagacacatttgggtataattttatcaacaaactctacataactactcttaaaaatgataaaattatctctaacaataaaagtccaactgatataataaataatactctgaaccattccctgttaactggtagatacattacaataaataatgcagtttcgaaggataatggactgtatgataaaataatatcatgcggaaggctcatgagggttcacaccctaatgccagttgtaattttcgctctcccagccatgtggagtgccgctttagctttaccaccagttgttacctttttagagcttaagaaaatcgcacttttatgtttgggtgctttttccgctagatccgctggctgttgtgtaaatgatcttgcagatagaaattttgataagttagtacaacgtactaaaatcagacccttagcctcaggctcaataaacacaacagaaggtatttgacttcttacatatttctaacataacaaattggtataatactctttagcactgatcactttaatgtttaattcaacgattgctttgacaattttgtatcaatttgatcctacaacgtatttttatacccagttttacacattttcacagtatcggtttgggactattaactggtgtgacttgttcaatttaccccttcatgaaaagatatattaaatatcctcagcttattctgggtctttcttccagtataggaacactaatggtatatttttaccactttaatatcttcatttaggcttggacagccataagtggtaatccattaacaatggctccactttgtatatatttaacatcttcactgtggtcgctaatttatgacactgtttacgctcaccaggataaaaatgatgatatcaaattaggtctgggctcattagcaattgaatggtacaataacttatactcataccattttgtacaattgtatgtttaggggtgataaaactaaaaaaatgtgtaatatcgtggcctacaatatgtcaattctaatggccacctgtggttatctagctcatcttaccgtatcttactactaactatttagctgactgtatacctatatataacattgtagagtataatgtgtaaaattgtgtaggatttattctatgtgtctgtggtaatatcgcatttatggatgttgagggagattaaaaaggtcgatttgagtgatccagcaaattgtctgctatttttcaaaaaaacaacaatttacgggggattattgttacttggaattattttaggcaaacctgagcttaaatttgacttcaaatcagaaaaatccctggaatccacagcttcgtaattttctcacaaaaattctcagatctttaaattttttgtcaaatttctgtaaatgtatcagttttataaattttaataatatataaaaatgattgggttacataatatatgtattttattaacatttgtgagaagtgtgttaagtgtgttaccaggtgtatatggtgatgagacggaatcaagtagaccaatatatgcaaacataaggagaccaaatacaaatagaattggtagacctagattaggacatagcagaggatttttaaatgtaagaccaccaatggcgccaaaaccagtggatctacctccacctccaccgccaattagcgttccatccgtagaacagtaccaaatggacggagaaatggatctaccaccgccaccgccaccgattagaacaacatcattaggacaaagaccaatggtaatgaggccagtagatgcacctccacctccaccgattagaacaacatcattgggacagtaccaaatgagcggtatcccagcaaaaccacaacgtggaatttcaagagattttgatgacttaattgacggatttgcagatgacgaagatgaagacgatgatgatgatgatgaaataataaggtgtaaagtggaagcaaaaagaccatactcagtatcgccaaccataacagttactggaattcgtgatagatttaacgccttgttgataggttatgacactcacatggacgaaagaagagctaacaaggcaagtttgtatggctggagtagtcctaaaactccttccagcagtggagttgcaaagtttgattttgaccttgattatgtatcaattctacctcagggtggaatccccttgagttactgcgccttaatctttgtacctcccgtagtaccaaaattcgacacccaaagcgtatttgcaaagccagcaatgagtttggcaagattcatagcctcagaggaacaccttgtaaaagcccttaagaagaaaaataaaagggtaacatcatgttgtttcgtcgcttatccgatggtagcaaaaagataattttttaccaacacatacacatattattaatatattttactaaataaattattaaatatattattaaatgaatttataactgtaaaacaatgataaaaattaaatgtgttggagaaaaagaatcttatgggagaaaggtaatgtattgggtttagaataaataattttaaccaaaatggacgccattaaggaagaattttataaaactcgaaatgagttcagaatttttaaaaagagaccgttggaatctattgaatatatcctctcaatatcttccatgatctttgtggcactcatgttctggaaaatcgctattcttctcacgggttccactttatctagttatatcatccaatatatattaattctagctataactctatgtcatgttatatgtatgtttaggaacggattcccctgtggttgtagtcttgagtggaagtatggaaccagcgttttacagaggagatatattatttttaatgaaaaagaatgagataaactcgggagatatcgtagtttttaaacttgaggacagggagataccgattgtccacagggctatcactttacaccaggataaggataacttatacgtacttacaaagggtgataataatagagtcaatgacagaggcctttatccccgtaataagaactggctaaatgacaaagatctaattggaacaattcttctaaaagttccaaaggttggaattctcagcatttatctcaatgaagttcctggcgtaaaacacgcagtcgtttgtatagtcgttcttctaatgctttccggcaaaggttaatattactccacacatacacaatatacatatgcaatactatttattaaggtgttaggttctattaagttagagtggcttgtagtctattgatttttttgatatttttagagtaatcaatttccttaagttcatctttagtcttgtttttgacactggaactaacatttacagctccactttctaaaataaattatagaaaaacaccttaccatgaataactggtccgtttagcatgaatttcttcttgttttcagtaataatgttctcagattcaccgaacttaggccacggaatttgacaaaaagaggaccatttcctcttttcctcctcagatttgaacacctttttactcctacagtcgtcgtcctcatttaaatacaatggcacacagcttttatttatataattccagtctaaactttatttatactaatgttattggtatataactctgtagagaactgagtaaactgtgtagctgagtaaaaagaagaaacgttgtggacaaggtttattccagtcgtaatcatcattttctatacaagggaagttggcaattgggcatttcgactcaaacattactttgttctcataacttaaccgattcaagtctataattctatactctggattattctttttctggtcttgtaaaatggtattggaattattgtgggagtcagtagtacttagtccaattaagtcagaataaactttatagcataactcattgtatgtcggactcatacatatgccattgcgattatttgtccagttatctaaagatttttcacacatattaatactataataattataactgagaagtgactgtgtaaagaatacttggacatttgttgtaatctcgtttgcagtcattagaacattcaaatgcgatgtcacatgcccttagatactccaatttcatctctaaaaaatattaacataaactcatatcattactctgagtgtagtgtgtgaagtaaaacttcttatcacaggaacctttataagaagtcggagcggaacaggatccattcgactccttaatccagtccagaggacaatcttcaaaaacaaatgagcagtttctctaaaataactttaaattcatagtaaattactatgcaaggccatttagttccacacgactcctaaaaatcaattcaacagttatctataatatagtaattgggtaccgcccatatgcgtttagattccttggaaaaatcagtgaaatcaacaatggaattacaaggtccaatgtaagatgaagggtctggaaattgaattaatcatgaataaaagtacctggaacacataaataattgtctgaacccttggatttctaaatctggtaagcaaaatgttgttaattacctctttaacaaaggatagtggacatgtttggttatactaaattattaatttatcataaattaaacgtacatttcgatcagaatctgcacattcctcgtttttattttcatttttacaaggccaacttgcctaaaaacaatttaacacaatctcaatttataatcagagtgaataaaatttgtaaatatgtgtaataaatgtgtaaaaggctacttggcatgaatttgaccagttaattttctcttcaggtgtgtaagattcaaatgacataacagttttacaaacgcctttataagaagctgtggctttacaaagttcaccaactttctaatcatctgtgtagatcacgtaaaaattacctcccaaccctctgtaaaattgttatctatggtgttaaattacctggacaaggctccgaaaaatcaggaatacatttccccgttatactcttcacttcacccgcatgttcctacattatatatgtaaataacatgattaagtatcaaatgtgtaaggaaattgtatgaataaagttggatacggcagcggttcttaataaatcagttccaagttctgtgatattttccggtttgggaacatgttcaaatgtttcaaatgccctaaaaaagataatttaattaataatttgttactcttgaaggctgtgtatatttggtatttctataccaaatttatcctcagatttgcatattattaaagaaattgataaataaatccataaatcaataaaatctctaatatacataagaatgtgtgaattaatttaatatattttaaacaaagaatcataacatcagtccccatcacaaattcatctaattctttattctaaactcatttactccacttaaaattatttgatttatataataaaaatttctattatgaaaaattatataagatttagtagcttatttaaaagaggtttaatttttcagaatcgtggatttgccactaaatcaacagcctatgatcctaagattgtaaatgaagctataaatcctaggccaggaagactatttaaatcaacaccgcttttattcctcttggctgtatcaatgcttacagtaccagtggtagtaacttattacgataataaagattttgaaaaggaaatggaacgaagaaagcaaccgggcgttacttactaatcttataacactatttacacggtaaatatattaatatatttgttggttatgagattgagtgtttgaatctgagtcctaattgaaagtttgagatgttgtcagtgggtgagtatagaattggtttagcataaaaagcttcaatccagcaaccatttgacaagtttaaacttaatccaccaccaatcgacattctcatatcatttatcaattgattataaaaaactaaatcactaaattactgtgttgacttacataatttgttattattcgataaagatccgatattaacaaagctgaataccatcggcctgaataatgaattaagaaaagggaaattgggaaaaaggaaactagtgaaatagtgaaatagtgaaatactttggtaaatttaatagtttaaaagggtaatataatgacaattgcatgtttgtatagtagtctccgcccaagtggtccactttattaatccattcttcactctcagtagttccacttttaacaaatcctacacaaaaaataatttacaagggagaacattcaataccataatcgtagggtcctaggccttgaaatgagaagccgcgaaatgctaaatgggatcctgacggaccagaaaagttaaacttttccaacaaattattactcttgttataattcccaaaattatacaaatatccaaatccaacattcatattgattatctacaaaagtatcaacgtgtgtgacggtgtaaactgtgtagtaataccaattgttggaataacaattttgagaatgataagttataattaagcttaaaaaagagacaatctcctccaggcaatcccgtttcctacgaaattaattatgaaatttggcgggatacaattttaatttgtgttaaatggccttgtgtgggtacaccgtcaccagttgtgttatcatgtttataaacgtatgagagtgagtttttgagtgaacagccactgttcctcaagaccctaggaaattattactataacaattcctacatttcagacgatttcattctgttgttgtaaactggataaatgtctctgatgcacgattcctaataattaatttaggttttatgagtttacccatgtgaaattatgtttttgatttaggcttgataagttgaatttgaagcccttgatcctattagtataggaacaatacttttttaaatcattgtaagaggtaaacactgaaaataaaccagtaaatttatccaataacggcaatctcgggataaaataactcccctaacaaaaaattaacattgtaactaattgtatatattgtgtaggaaggtactgtaagttcattatttcctgttcctgcggtattagcacttaaagttagagtatttgatgagccaaaaagtcccggaatctcacccttaagctcctaatacactatgtaccaatgtatacataactagaaattcctaataaatagtatgagaagtacaattccggctttggtttttgagttaacattggctccaacggtgtaaaacgcaggtttctcctcaaatgtaaatacaacatcaacgtctccttcctgattacctcggagcacattcgtagtcaaacccttaaaaacaccaagtctatcaagggactacagatacaaatattatactggaataataatggaattatatgggaaaagtggaatcttaaaaatagtatgagaaatacttgatgtgtttgttgtagttgagtcagaagttcgcccaaatttttagaatcttgaagtttttcaatatctttcgcaattgttgaatattctaaattaaattttatctgtaaataatggagaacaaacttattttagttagtcctttggcaaaaactcggacatttcctaaatttttggaaacgtccaaattgtaaaccttttcttccgtcattttaaattttcaaacaagacaattttacattaaaatataaatattatacatctcagttatacacaagtaataacacaaatccagagttatcaatattacaaggttaaacgcattgtaaaataaaaaatataattgaataaaaaattattgaacttcgtttaaataatcttcgatcatttctggtggtaggattttaaactttttatcaggtcccactactccaatttcgatattttcagaggttagctctccttcaaaaccttccttcagagttaaaatcgcaatgtgaattgcatcctcaagttctaaatccgggtgatatcttttctccagaaatgtgttattattttgcattctgttccctatagcagtggccttccaaccgaaaaaagcacccgaaggatctatttgatacaattgtggcccatcgtcatcatacctacaaccatattaagcatttgctgtgtgactatagtaacaaatgattagttaactatgaaatgaataaatagtaggggagatgtgtaagatacgatgcaagtaggagtgagattccaaagggccgaacaccgcctgaatgtgtaaactcttgcataattgatgctacgtccttcactagttgtgcgcctgggatatcatcgccatacatagccttatacttcatagcctataataccattacataccttataaactatgtaatatctgtatacgtatggtaatatctgaactgtgttatctacctcttttctcccttttttgaggacaactctgaagtctgctggcatgccagcggctactgcgccgatatgatctgcgaaaaagtcaattttattaagtgaatcgctttcaattaaggtggaaggctgtttcttctcagcggctatgacaacaccattcgtcgccttaattcctgaaattaatcaatacatcccgaaataaatcttttattaaattataaattatgaataaaattaggtaaaattgtgtgaaataagtgtaaaattgtattaattggtaccaagagttggagcgcctttggcgacaccatttaaggcgtattcgatttgaacaagtttgccagatggactaaaagtagttaaggaaaaactatactcgccatcgtctgccattttaattattaaactgaatcaacacgttgtggtgattaccaacacattttacaaataaattttattaaattatttttattaataaaattatccaaaaaatcaatttatgtgaaattattatcagttgtttaattttttgattcctgagatttgttcgtaatattccactgctttcatgtaagtttcatgtttttcagggaagaacattgaaagttctgagaatctggccttgattggcattggtcttttatcgatagttttgacccatttcgagaacattttcgggtcaatttgctccagattattaacaaatgaaccgccaattacccataaatgtttctttatcttattacccttgattcttctcctgaatatctcactaaactcactactggcttcacccgttctcttagccttggtgttcttaatatcgctatccctcgcttgtaaattaatatttaccactgattccatgttaataaatttgccgcctaataaattgatgtgtcaatagtattttacctgtcatagcataagttgttatgtgagttccataggttttgaagagattaatccaaattcttaaatttttacacgactccagctcagttataaatatgtcaattggacattctgtactttcaacagtatttggtaacttccctaccatctcaacaaactcccctctcaactctctataacatattatttgtataattaatatattttgtagtaatttctactgggttacccgtggaatggtgtgattaaaccgctttcatagagactgcagtagcatttgacaattttaaacttgctcttgttaaatgtgatatcatttaagcctaggcctttagaattacgattccatagttcttcactaaatggactgtccagactaaaatcattaaacaattccctcaccaaatcactacccctctcaatatccctgggctaacacattgatcaactgtgtatataattatataatgttgtgtttacttcataattttgagtacagttgttggattttctgacccagatgccgttatttctcttaattattatgttaccaatatcccgtgtaatgtaaggctggacaataatgggtgatctgaacccgaatgtgttcaagtcattgaaactgtccagaggattaccctcaactaaatcaaacccgaatccaacatgacctaaaaatataccaatctataatttaaatactgtttaaatagtctgttctctgggtattgttgtggtaattttcaggtaatattacacagaaacatctggtatagactgtaaatagtatgaagaatagtgtagtatacattatgtataggaattaggtaacagtaaatactaatttagtatagttaatggcattttggatcttttgagaataaaggtataattatgagtctagtattattaatttgttatttttaataaaaattaaaatatttaaaaggccaaaatattaatttattttattaaatttaattattgtgtaaatgtgtatgatgttgtgaattttaaataatattttccagaatattttacaatatgtgtagtataaagttattttattttatatgttttatttgaatgtagttgagttggtttaatttgatatggaacagggctgtaatatagttttcttgttattcagaagattcttgactgaaggttatgaaattaccttttcttttaaactcagtttcacgcagtgtgagtttaaaggaagtagaaactgtttttagcaaatttttaaaagttcttccaaccttggatgggaataccatatcacactgtataaatattttatcaaagaaggagataaatcagccgaaattcctctggcttaagactgcagagattctcactgactcagacaataaatcaaatcacaactcaatcctctcaaggctcgaagttaaggatgtttgtattatattaaactcatttgccaaggttaatttccttaaccttaaactcatagaaacaggaacaagtataataattaggcaaattaggaacatacacactagggatctttgtaacgttattcactcattagggaaacttaaccagcattctaccctgtccgcagttataaataaactctttaagcctaagaataacaagataaataacataaattcagtgttaaaagtgataagtaattgtaatgaaaaggacttttcaatgttacttcgagtgttaatgttaaactctgagaatttggatttcgattctgtgactaagaaattgcttaactcattgactgataaatatgacagcctgagtgaccagacacttgccatactggcaaactctgtcgctcagtatggcaaggatgaaaacggaacattgtcagtcctggctccaattataactttgagacttagaagaggaaatttcactcctcagtgcattgctcaaatctcaaatggctttgctaaacttaattttcgtgattttgaacttttttcagcacttgctcagagagttttaatgaacccccaggagtttcctccaagatgtttagccaaccttttaaacggatttagcaaattaaacatattcaatgaacaattgttcactaagttaattcctcagtttgaatctaatctcagtttgatgactccacagtgtattggtaacaccgtcaacgcctacagcaaattctcatctcaattgaatttaaatttgttattcagttttttcaataaaatgatcctggaactgctgaatttcaacacctttgactcgtttataggtcaaaactacgccaatattctctctgggatcactaagctctatacagaattccttagatctcacaactctcagtctaattatactaatgaaacatatgaactatgtaataaaatgttaatggcattgataaaaaagttgtatgtgccgatgctggagaagtttgaggagtttaaccatttggatgttctgatgatttttaactctatggccagattcagaatatgtgacaataatttaattggaaaattattatcaaagttaaagttatttatgcaaaattataagatctttgagctgattaatattgtgaatggttgttcgaaattttataccacagatctaaaaacttattttccagattcaaatttaaatacctcactaacccaatccactctcaatacaactataaatcacgctaataaattcaatacccgtgacctttataatacccttgaccttaataatacagttgagaataataatacagttgacagcactaagtcagttgacgtcgctaaatttgaattgaaagatgttagtactatttctggtatctgcaatattatttgcactagtgatgttgttgataaagttttaatcctggattattacaagcattttatggatcatctgattaagctattgaggggcaaatccctaagctataatcacattaggcttgttttcaactctttaacaacattcaacatgcataacaaagattacaatgaagtattgagtaaagttttggtggattcagagctggataagaatgaggaaagagtaattaaaaccttctcgtcagttgtggattattactatggaattaaccaaaaaatgccaaatcacctggaaaaatacattctatcacatctgaacacttgtactatcaattgtataagtagtaacacaccaatttactaaatagttcaaggttataagattaaataacatcattaatatttgtgatgttgattaaaacgtcttcgtattcgtttaatatttgtaactcgtcggagtcggagggaattccaatgacgttaacaactacattgaatgtgttatttctaacttacacttgtatttacgctttatttcatccctaagcctgtggtattcactggatctagactcccaaccatatcttattattacatcagatccgttagagatgtatttagttatgggatctgaactatttactagtgaataacgagttctgttaatcagttggtgaggaaatttgttatgaattttcgggaaaacgaatttccgaaacttgaagaacggaggtttccttgcgattcgcctaaatccatactcatgcggtatgaatttaggtaaattccaaacatgtttaccatcaaatctgataataacattagaataatatatttattagtaatgtgttaatgtgtgaaaataccgtttgaaaattaaagtatccttccactgtttaaagctggtgattgtggttttatttctaatttggattaaagaataagattttatcagcattaaaaaaaataatttgatgtttatgtgtggtggattttttatcattattaatgttttttgtaaagtattcctataaacttgttactaatattcatagaataaattcatgtaattttaacaatattaatagaataaacttacataaatttgatttagtggatgggataaattttggtgataaaagatacttcatgaattccttgtttaaaaatgacaaaaattacgaaaaaagggacttaaattatgttaaaaataacattttcaagtattacacaaaaaaggaagtgattacgctttttttacagccccttgttgttattattatttacatactttcactctggcacattttcaaatacacttgtaacatcaaagacgtaacaacttaattatcactcattaaatgacgtaaattattgtttagattaacgattttataaagaaaattaagtggattaaggaataattttttaacttttctacacaaatattcattttattatgtttattcattgtcctatggtcatgaatcgtaatttttgagtgattttgttcacgagtttgattttgaactggattataatgtcaatgttgttggttaactcttgtaaaatgtcctcaattttcagctccttcatcagcagacagttgggaatataatttgataatttcaacaacaactccattatatttatcacataatcattgtcattcacatatctcatgttctgcatccgtacataatgtcaagtatgttgactatgtaaatagcgtaaattaagtatagaaatagtttgttggtactggtagtaggattggtattaactcttgtccgattttgactgacagtttccgattcgaaattaacttttttatacaaaataatatctaaatcattgttactaaggtcttaagtgtgaaaataattaactaagagttacatgattgaattggtgcacggtgcctttgagattaatatacgcatataacattgtatcaagtatatactcaatcctacatcaatattactatatataataaaactgtgtaaaaatacttgtaatccgtgggtatggaattggaatttgaaatttgtcctacgatcccaccgacatgcgatatcacatttacattatcaatattcatctaaagataaataatggagttgctgttacttgtatgactttggtgatgttgtttataattccgttgttgaccacagggtgttgagctaatttggtcagatttagcattaacttcaatgataacattacgatctcattgttctaagaattattaacagttaataagttatttagagtgactgagataactgttgttacgtggtgtaatgacaatttgtttaaaacgctcataattccattattgatcattaattcctaaataacataactcaataattattactttgcaagagatattgtggaacgtaaaattcaccaacaacgacaatgacaacgtcattatattctcactattctaaaaaatattattaccatgtaaacgatattgtctaaataattgtgtgtaaataattgtgtgtaaataattgtgtgtaaatgataataatggtgtaaatgcgtgttacggtgagtttgagtatgttgatgacaggaatgagtaatggagtgtagacttcgtctagtggtagtggcaactggttcaaattatatatcaagcgctttatcaaattctcgtcattgtatctctcaaatattacacataacaattttatatacgcagccctaaaagtacaagtgtatgtagctggaatagtagaaaaaatagactagtagggaaatactctgttttgattagtttggagttgaaaaggccttcttcaattagtctctgaataattaataataatatttgatatactgatgtggtataaaagttgaaggtgagattgtcccaattaagtccaggttcattatcattgtaatattttaacacttgatcaattgtgttgtgattatactttaaattaaagtctacggatcggaaatgcattaaaaagtataaaattttcacaactctttcattagcatttcggacaatcatattcaacaaatttgtatcacctaaaattataaactcagttataaattacttgagatgaaattgtctattgtgaaggttataaaatcagccagcttcatcacgaacttattctcatccacaagtcccactatgaaaaatagtattttagccaaaaatataaatttttagtaaaacgagtgtaaatagtgtactctgttgtaatgagagaatttgtgagatgtattccatgggctcgtcagagataatttcatcagtcagcttatacaccaggtctacaaatattacacaattatttaatttgttactcgtattgattggtagtaatcttaacaatgagacgataaatgatttcacaattttaaagtaacttatctacaccagtgtcagcttttatcaagtttaaagcgataaattgtgtgaaatatacgtggagtttatagtttaggagtagttccttgtaataattgaaacttatgtccaatctgtcaatcctcatccttatcaaattcttgtcactaaaacacattaacactagtgtaaaattatgtaactagtgttaatactattggatacatgaagaaagtgttgtttggagcggttacggagtttacgatggtgttgaattcgttgaataaattcaaattattcattaatttaaatgttacttccacgtcctggtacttatcaagcaacggtgggatatctaacaacacacattagtatactatttaacaactagttaactgtgtaaagagtaaataacgccccggagggagctaaataataaatgtgtgagcggaagcaagctccgtaacgcagtaactcacaaagtcgtcttaagagataatgtgagagaatataattattatgtttgataacaatgttgtaggatagccatttggaaatgtcacaattgaggttcattttcttgaaataaaagtcatcacgaattattaacggagttttatccagaggattaaacttgtcaacgttgattttatgttgtggtaagtattttctggtagtgtcgtaaatgttataagttgaatccgttataggtgttggatcactgattgtaattgtcatgtcaactcctctatcatcttcatatctcttgtaattcaagccatttatcgttgtaactacggaatcgagtgattggggatgaattacctttgtaagtgtgccgtaagaaaaggcagtaatcaccaataataacttttctataccttaaaaatatgaaaggggtaaaaaatacttgtaaaagggtaaaaatgagtttttggggtcaattttaggcttcgggatgtcctccgggagctaagtaaatctttttacacattgtgaatttattacctggtagtgttttaaagtgttaaaagtgttttttgagattattatattattaaataacttcgtatagtctggagtttcaactgttatttcatatacgccaatttccgaatcagctgaattccccctaatctctccgtttaacagattttggttgagtttgattgtgatttcagtgccgtggtcattgatggtaatgtcactgattgaggaataattgatcttaccatttttaatcacactcgccaagtcacaagtagtaaaataaatgcctaaaatttttaattaaaatgttaattaaaatatgattaatttgtagtaatttacatttgtcgccgataataatgtaagattttcggacagatgtgtgaattgttatcttcacaagttcaaaataccgaacattatcctccaccaaattagtcaataaccttacatccatttcacattaattctcatatttcacaataatttttaatattttacattatattttaatattttacattatattttaaaaattcacgaaaacgtgtgaaaaaatgaaattatgtgaaatatgtgtaaaaaatgtgtaaaatgtgtaaaatgtgtaaatgtcataggaagattccagattatggtgtttggaaaggaatattaattttttttagctgattggagatattttttattttcttcttcctggtcatttttcgacatttgctcataatacttaaattccatactatactcaccttgaccctatatcaatactatacccttaactatactataactaataactatactataactaataactatggtgataaaactgtgtattaaatactttggtggcggatctgaggtctgtgatgtatccgaacatgtgtttgagtggtacgttggcattgatggtgacggtttcgccaatgatatttgtgtttgtaatgattccctttcgtttcgtcagtgttgagagggtctgggactgaaattcctgaggcgctgtgacttccactgacatcacaggctcaagaattatagcttcagcctgtgaatacgccaattcgaaagcgccgtaagtggcaagtttaaaggctaaatcagaagaatcaacgtcatgtgacgcgccatcagttagtacaaacctcgtattaaccactggcctgccacataataaaccacgccgacaactctccttaaacccattctcaatactcactatgtaattcggttttatctcattaccaatctacatcataatttatcacattaactcattaatacattagctagcgtaatatgttaactgggtagaatatgttaactcggtagatattgttaactggtaatgaatataaaactgagtagataatacgaattgatttatgaattgtatgttgagatgttggttgggattatcggcgattggttcgatgtatccaatgactttggcgtattgtccaacaccgccagattgtcttttatgcgtataattaaactcggcccggcgagttatagtttctctgtaatttactataggttcgccaacctctatagttaagccatattcccgcttcatacgctccaaatatatattcaaatgtaattcacccatacctatggatcgtgttgtgacggttaagtgtgcagtagtttaggtcagggaaggatagttaagagccccgcaggggctaaataagggataattgagtttcccgggggtcaaaaagagtcccatagggataataactctgtataaataagtaaatgagtaataaataagtaagttggtacaagcaccgtaacggacctgagagaatagtttctttagattcttcatcgatgttgattttaaaggttgggtcttctttttggaatctgttaagagctttagcaagtttaacagagtcgctcctgttaacattttttaaagccattgagaccacaggttccggtacatgcattggcttcattgttacttgtctgccatcagtaactgtaactccagaaggacattttagccctgagattgccacaatttcaccctctctagcctctgaaacttctaacacctcgtcggaatggactttgtataacttcttcaacgtcacacgcttgtcctcttccaccactaacaccgatagtccacgcctcaatactcctaacacatttacatagctaatttatcactaattaaggcgtaaaattaggataattaagggtaactaagggtaattaaggataattaagggtaattaaggataattaagggtaactaagggtaattaagggtaattaaggggtaaaataagggtaattaagtagtaaaaatgactaaataaggcttaaatagagataaaataagggtaaaataacactggactaagcccaaaatatgactaaataatactaattaagggtaaaataagcctaaatagtggtaaaaataggccagaaaagagcctgggtaaggctggaaaatacctttgtagattcgtatgtaagataattgtcccagataagtatcgacaattttaaaaatgtaaccaactaatcctttatcctcaggttttaactcaattttattcatctcatccgactcagaactgttttcaccggaatttacatatttgtacagctgtgtgatgcaatttttaggcgagggtaagtaataacaaattgaattcaataataattgcacgcctttgttaccctttgcactgcccattagcaacggatacatcacatgtgacattgtcagcctgcgtatactattgataatgtcaccactgttataattggattccaaatatttttgtgcaaattcgttgtcatgatctgcgatcttttccaaaagctcaaaatttaacttttcagcttcttttagcatgttttcaggtacgggttgggagactaatttttcaccgtattggcccctgaaataatacgctttcatctcaactaaatcgatgatcccctcaagtttaggcccaattcctatgggaatttgtagttgcagaagattaactccgagtttacgctggagcatttggatactacgatccacactggcaccttctctgtcaagcttattcaggaatataatacgcggaatgttatagcggtccatttgacggaataccgtgacagtctgggactggacaccggagactgaacataccaacaacactgcagaatccaacaccctcagtgacctttcaacttctatagtaaaatccacatgaccaggcgtgtcaattatgtttatactgtaatccacaggatcggatactccaacactatgagagttttgtaatctctgtacaccagtgacattagtattccagggggtattagtgttccatgagatatcagtattccatgagatgttggtgacggcggattgtatggtgatgcctttttcgcgttctaaatccatggaatccatcttggctccgacgccgtcagtgcctctgacctcgtggattgagtcgattttcccagcgtaaaacaggatccgctcagtcaacgtagtcttcccagagtcaatgtgcgcactaatgccaatgtttcttattctctcaatgttatacacattggaatctctcgtcacagtgctagaagttgaaaatgatttcacataatttattccactaattagtaattttacattgttaatttggtaaaaagaggtaaaatttgtaatatttgaaatatttaacaagtttgtgttaatttgtgagattttgggtagaatcaaaaaattgcgataaatcacagcatttccacatcttaacatcgttttaactatttactacattacattataacaatttaatattttacaaatatacaaaaaaatgtgaaaaatgtgaaactgtgaaaaaaataaaatggtgatgtgtatattacagttaggctcgattttgcagtcgtttacttctgaagttaactttgtgtcgtttagttttgtactcgtcctcctcaaagtagttgagcgtgtcgtcgaaccgtacgatctttgaaatgtcactcagcttcccactgagcagattcataaaaccaattaaaatgttctcgtaggtactgttgtacatgcccgtaaaccgactctcagttatcccaaaaaatagtaaattctcattcccaatctcacctgaaacaaaatcagatacacgcaccattcctacacagaattattattatataattaagtttagggtcccaggtactatccaggcatttgtctgaagtgtatcttagataactaaataagtagtaagaatataaggtaagagaggataaataaagtaaatagtagggaaataactgagtagtgggtaactgagtagtggttaactgggtaagaaggcggtacctcccgcatccggcggtgtatctattggtttgaggcatctgcagggaattttgggattatcattgtgtttaatggcgagataattaatttcatagtgtttggagaattgcatttcctctttaataaaactgtatgcgaatcgtgggaatgtctggcccatctgatgataaattgaaattagcctcgatttatgctgaatacgtttagaattcggcaacgtcatttgatacgcgtgggcgcataaacggagtgtcagtgtggacaagacgattttcgagagtatttggtcatccaaattactaatcaactttctggcgttctttttcccctttaagtttatgaagttgacgtagctggtgatgttattattgagccacagggtctggatagacctctcgtagtcatcaaagacctcgacaattccaccagcaatgggcgaaattgaggttttgtcagtggttttctgagctaaaattatcatacagccgatgatctggtcagagtccaaacggtccaaaaatcgcttcacacccagaaatatgtcagaaccttctacaatattattacactatcaacctataggtatataataaagtagctcccctcccttagatagttaagtagctccctctaggggtatataataagtagctccctcttggggtatatctaagagtatatagttaagatagctccctcttggggtatatagttaattagctccctctcggggtatatctaggtatatatttaagtagctccctctaggggtatatctaggtatatatttaagtagctccctcttggggtatataattctaggtattctaggtataatattcttaagtatttaaggtatagttagagtatttaaggtatagttagagtagttaaaggatagttagagcactggtttacgtgttttatgatcatccattggtagttgtttaatcattaaatcttccaatttcacttctttctccattacatcccccttatccaccttttctacagttgtgtccactgtttctaccgttgtgtccactgtttctaccgttgtgtccactgttactacagttgtgtccactgttactacagttgaatcctgagtatctggtgagttggtaatgttctccgtagtgttggaggtactgtgggttgaggtgtgttttaaattatgatcagattgactgtggatgattgagtgattttcatgtttgtgattgagtttggatttgtatgaggaaaaggtgtctgggttatttttgagtattttggagaggattttgcgtttattccggtcactggttagcttgtccatgggcagaaccatggcgtagggctgtaaatcaagcatgtgaaacacaacgtttgtactattcaccagcttctgcagtaccattttcacactctacacccgtgaaatattccagagtaatctcacaaaagccacgccatcaccgggaaattataaattattatctcaatataaataataattatgaaaataggagaataaagaataataattcacacacatggggagaatcctctcgcaatagtaaattatattatccaattttatctctcactcattataaattagataaaaaataattttttaaatagataattaattgtttcagcgggtaactgatcgattgtatccttggttaggccgggaattaacgaatatttccgtgtgattccactggtattaatattagtttagcagtggcaactgggtaaaaattatgaaagatgtggaaaaaaagtacgaaaatgtgatttccggcggactaaaattaaaaggcaaaatcatctcaaaatcaaataaaaaaattattaaaccaattaaaaccgaagattccaaagaatttctcacaatcccaaatgaaccgcaggaattaaccagcaaaagtgacctccaaggaaataaactagatgtcctcaaccaacgaatcgaaaaaggtaaaataattgaattaattatttaatcaattattagattaattaattaattaattgtgtaatggtaaatgaattttttggtagtgaagagtgatgtgagtttgacgagtagtgagaaggcgtttaagatagcgcagataaagagaacttacaagagaatcgagcaatcactcaaggaatcacacagggaaaaaatcgaaaaattcaacaacaaactctccaaactctccgaacgtaattgttacacaattctaaattatttaattaatttatattaattaatttttattaatttttgttaattagtttgatgtaataatttttgtagattttgatataccgaaggttggccctggataatttattaacattgtgaaaaaaatttttttaataattttaatattttttgaaaaataatttatttacggattcatacaccacactttctgtacttttattttatcccgtcacatccttaaatatttttaattatgattcacattataaaataatgttaacagcgtaaaataatgtgaacagtgtaaaataatgtgaacagagtaaaataatgttaacagtgtaaaatgagtgaaacgacgtttttgggaacgccggtgacgaggcatgacattgacgacatccgtaccatatctcagttatgttaattatttactctaaattagatgtgattgtgttaactgtggcttagagataaatgtgaggagtaagcggggcagggaatacttggaatcgaaggagctgaggtaccgccaaaacagagaacaaattaaaaaaaacacacccaaaatactctacacagtagacaccgaagaaggtaatccacaaccttactcaatcaaaccatctacactctaactaactttatcctctaactaactttatttattctctaactaactttatttatcctctaactagctctagttaccgttagaatactcttagtgtatagttagaatagctctagttaccgttagaatactcttagtgtatagttagaatagctctagttatcctcaaaatagctctagttaccgttagaatactcttagtaaatagttagaatactctctagtatacccttagaatccctagttatacacttagaatactctctagtatacccttagaatccctagttatacacttagaatactctctagtatacccttagaatccctagttatacacttagaatactctctagtatacccttagaatccctagttatacacttagaatactctctactatatagttagaatactcttagtatatagttagaatactcttagtatatagttagaatactctctactataggcttagtatagttctggtgtatagttagaatgtggtatgtagttgtgataatttggaataggttggataccgtcggagtttaagtcatcaaagagtaacagagcgaattataactttcaaaccctcgccaacttcaccgatcaagatgatgtaaatgacttactcagttttattatacttaactataccccgagagggagctattttaatatatacctagaattatataccccgagagggagctaaattaactatatagagggagagggagagggagctaatttagtatatacccctaaagggagctaattaaatatacccctagagggagagggagagggagctaatttagtatataccccgagagggagctaattagatatacttataatactgtgtgacaatgttgtagatggacataatatcgatgagggtgttgaggagtctgaagttaactcagcgggaaaatgaaatctatcgcattatcaagagtattctaaagtccgaaggcttcattgaacgcgtctacgggccacaactgccaactagctcacatcacagtgtgagagacctcgatgacctaacaggtgtcggatacaacacgcaattgaacatggaagttgatactatggaagatggtgggagactctgttggataacgagtgagaatgacagggaccaactgagtatcccttcaatgccactggggatacgagagggagagtataaaaggtaccacgaatacgatagagaggaggatttaatggatattaaaaattactacaaagagttttacaaactcattgttaaaccattgcaagattttaaaccacaaaccgaacaagatttactataccaatacgcgaaacctctcgagtttatttccaccaacaccgagagggagcacattttcaacaccgtaaataatcacagtgtaaatagtaagaattcaaatagtaaaaacttagtgattgagtataaaaacaattacaagggaagagaggtaaaaaactatgaatttacgagggaattgttaaataaatttaaaattaaacagaaatccaatcaaacaaatgttactcccagatttacagtggaatctacgggggaatctgtaaaattggaggaagagataaaattaccaaatgaactgtacaaaaatttatttgccaaattatagggaataaatttttaatatatttttattcatatttttatatttatttttatagggttaaataatttagtttatattttttaataaatgctgaggatacaaatatgccgcaaaatgagtatatagaacgacatattaaactacatggccgcagattcgatcatctcaccaaaacgtatctttccaatccatcattccaatctatcaacagattattcaactcaacaattatttaaattatataattaatttaataatttaataatttatttaattgtttatataattgagttgaaaatgttgtagtcgtaagaaggcggcgcgagcgcctttgagggagagtaaaagggccaaaactctgcggggaattaagtcgaaaatattcaaaaaacacaaatacgccgaaaaaatacaattcagaaaattgtaccacaaaccactcagtccacccaatctactcagtctactcaatctacccagttactcatcataattactgtgaaaattgtgtaatttgttgtaggatgaggcaaagggaggagaaggaggtgaaggagaagatagttgagaagaccgatggagccattccagcctaccttctcgacaggggcgatattaaccgaaccaaagtaacttttacactattctattctgtgaattactaaatgaatttgtagatattgagtaatatgataaagcaaaagaggaaggagaaggcgggaaaatggacagtgccaatacccaaagtatgaaacaactcagtaaacaattcctcaggtcaaagccttgaacgaaatggaaatgttcaaagtcttaaaaacaggaaaaagaaaaagtaaacaataccacccacccattcatatccttaactaatacccctagagggagctactttactatactttgactatatacccccagagggagctattttactatataactagaattatatacccgagagggagctatcttatatacttagaattatatacccctagagggagctaattctaatactattaactatataccccgagagggagctatcttactatgtacccctagagggagctaaataactatgtacccctagagggagctacttaactatagtaaataatggattagagaaaatgtggaagagagtgattgacaaggcctgttttgtccccgaggacttcaccagaaaacctccaaaatacgaaaggtaatcactcacactataattaactcaaataactatactaagttaaataactatactaactcataactatactaagtcaaatagttatactaactcaaatggttatactaagttaatgtttagatatataagacctacgggtttgagatttaagaaggcgcacgtaacgcacccggagctaaagactacattttacctcgacatcatctcagttaaaaaaaatccacaatccactctctacacctcactcaacgttatcaccaaaggtattatccacacctctctacacattcttacacatttttacacacactaatagtattttacacattcttacacatttttacacacactaatagtattttacacattcttacacatttttacacacactaatggtattttacacactaacgtgtcttttttacacatttacacacattcttacacacactaatagtgttttacacatttctacacatttttacacacaattgtaatgattaggaacgataattgaggtgaatgtgagtgagttgggtttggtgacgcagactgggaaggtaatttgggccaagtacgcccaggtcacaaataacccagaaaacgacggatgcatcaacgccgtactactcgtctaacacatttcaatattttaactatccactatgtaactaggtaaaaattgaggaatttccgggatttagggaatttagggtaaaattgtctaaatctcagaaaatctcattttcactaaaaattcttaaaatcatcaaacaaattattaattaatttggtaatagtataataattgtctgggattggattgagatttggaggtgcagtgatgtataaataatccgtttcccggactgaaaataatttctattacataataacaatatggagataaatattttgtgtaaatgtgtgataatttgtgttctagtgagctcagtgtgtggtgctagcttcgatcaagaatcaagcctatccaacgattctgacgattctgactattgtgacgagtatttaccgtacaatcccgtgactgatagaccagaattcctagaatttgacctgaacaacaataatagtgtgaacaaagtcgactgtcaggttagccagacaaactatgaccagtgccgaaattgtaaggctaaaaaaggctatgcctttaataaagtcattagaaccaaaggttcctcatttggctttgatcaggtgatttgggaatcacccgatgaaactgtctacgtcactgaagttacgctctgttccaacgttctgaatcggagatacttagtattactactgtcgaatggtaatttcctgttatttggccgtgaggacaggggtactgagtgggtaaatttaacctccaggaggctaaatttatccaactttaaactcctaacctttaatgagacgataaataatttagtagaactggagcctacaaagtatacaaaggcgtttaattacctgacgcaagtgtataaactaaggtccagaatcgcatgttacgttattaagctccaggaacaagtggtatttaactacgacgaagatcccgaatttggcgcagctaagcaaatattatttaacctcgagacgggggatctaaccgtcataaacgttgaaaatgatactaaaaaggtgaaatataatcagtacaaatggacattaccggaaacagattggaccacagaagtaactggggaagatttgacattaccaagcacagaattgacattaccaaacaaagaattaactactgtgggaactggagaagagttaaatttgccagaagttgaaaaattgagattaccagaggcaaatgacttagctccaggtgtgcctggagatgagttaaatttaccagagcctgagcaacaaaatcaagtgccagaatctgcagctcctgaaccagatttaacacctgaaaccactgaatctactccaacactatctgaacaacctaaagagtcagaactaacatctcctcctgaaacatctgaacaacatgttccgacacctgaaacatctctagagaatgttccaacacctgtagagaatgttcccacaggtgaaaccttgtctactactaaaggtacaaatttggtaaattatgtgagagagttgataccgcagtatggtcagagtgactttaagtccccagtaaccctagacttaactagtaacagtagtgacacgagctataaaattgccgagtcaaattactttacatacgttcccaagaccagatttatctttaacagagtggttaaatcgggtaaattcgggtccccggagctaatttggcaggcgccggatcatcaccactattccctgatggtgcatgcatattcaacttccttactcacttgtgcgaataatgtcaccatcctgatggtgaacgggcagactttgacactgtgtaaagttgaaaatgactggatagagtttgacaaaatcacacttgacattagtgggaacaagagcctggacgagtttgactactctgtcaaaaacggctacgtaacttttaccgtcaaatctggttactttttcaaggaaattatccagtcaaactcgctgctactgaataaatccatctggaaatctgaagactatgcgttaaaagttagactaaacaaaatctcctacgaccagcaatacataattttactgctgaaaagtggtaaattcgtggtattaaacaggatcggtgatacaaacgggtggcatgacgtgacgtcacggaggctaaacatgggattactaaagctatacgacgccggaggagatcaaatctaccccagccagtacatcaaatcgctctatcatctctcatacgcttactttttcaagttaatcattagttttacttattttatacataattttactattttaggcatatttaggggttatttaagctatttttagtgttatttagctcttatttagctttagtttggtctttatttaggcatattctagtctgtttttagtgatattttaggcatttttagtgatattttaggcatttttagtgatattttaggcatttttagtgatattttaggctatttttagtgatattttaggcatttttagtgatattttaggcatttttagtgatattttaggcatttttagtgatattttaggctatttttagtgatattttaggttatttttagtgatattttaggttatttttagtgatattttaggttatttttagtgatattttaggttatttttagtgatattttaggctatttttagtgatattttaggttatttttagtgatattttaggttatttttagtgatattttaggttatttttagtgatattttaggttatttttagtgatattttaggttatttttagtgatattttaggttatttttagtgatattttaggttatttttagtgatattttacccctattttacctctattttagtgccattttggtcaatttttagtgttaatttagtcttattttagtcttattttagacattttgaagctatttttagacatattttagggctatttaagccttaaaatagttatttttacctctaatttagtcatttttagtcaaatttttacattatattccaatttaaaatagtttgtatattgatttagattgggtgttaaatgtttttcgataaagctgggtgacaagttaatatataaccacgtgagtgaccagtggttagggttcatccggggcattttcctggaccttgtaaataataaattatatataacggacttaaccggtgagaggaaagatttagacattaaagacatgatatcagacgataaatacttgatcaaatctgagcctaaaaattttccaacacataaaggacccatctactccgctatttatcccatgtaatttcttactcaatgttattcactatatagtatagagtaaataaacagtacctatggcatacagtataatgtgtaagaaaaataaaattgtatgtaatggagtaaactctgaatattatccaaatgattaagcttattaattttaaattaatatttgataacttggtggaaaattggattaaatcccccatagaattattctggttcaaatttattaccaataattcttccaaaatttggtctatttggcattttaatcttttgcataccagttggtatttttgattttaacaaattggattgatgagaattttattattttgagtaaaaatgctggagcaagtacgtccgattgtatttgacgataatgttttaaaagcggataaggaacggtttgtaacggtttatcatgtcgaggaaccgaacccggaatcgcccggtccttacccccttgccagttttttactactcctacccaggcttggaactaggttttccaccttcaagtcagattttttcccgaatactgaggctaatttgagggtcgaggatggtgaagtaatgactgagtttgttggattttcggataaaaaggactggtgcgtctcggtactaacactttggactccgcagaaagggttgtataaaagattttactttcattttaaggataaaggtgagttgaaggtggtacagctccacagtatggatgagcttgtagaacatacgagaaaatatgtgaaacctgaagtagttcaagtgttaaaaaataaattaccagcacacgaattcacacaaaagctattagaagcctataaacatcattaataagatttataatggtgtgaatttagatgatttggaacttttgaatcgtgaaaatttgtactccaattggattacgtgggtgtcagtttgaaatcgctgtaatttgtgatgttcacaatactaatttacacccaaacacatacatattatatatattatacatagtatattacctatagtatagtaagtatattatattagttgggaaatgtaactaagtactatgtggacatctggaaacagttgtgaggttaatctggagatggtaaacaggtgagtaatcttcaatggttgagattggtaatggttctttctttggtctcgaatcacaattgtcttcttattgtcattgattgtgttttggagtggttttcccagggttaacccagtcagtcacatatccctccatatccaaactttttattatattcttaaatagtaatggtgtttttcttgagattgaataggatttcaattggtaatccctgataaggatctgcgcagtaatttcataacaatttgtctccaaacttcaagtggtagcaaaggaaaagagtgtcctaatggtaaatccacataaccctgttctacattgtgacacattagttattttgagatttaaatcgtagaactctaaattgtcaacttggtgtctagtgtgtttaatgtcttgccaggaaccttttaagtccattctactgtataacacaggtttacaattgattaattcagctttttactgtaactccgtcatgatttacagagtttatagattatatttagtgtctcggaggggttagtaagaggttggtaggttagtctattcttaccaaaacatataatatacttatttaatgagttaattctactgttaataacttgtaaagagtattagtatactattactgtactatattaactatataccactcttaactactgtacctattatacacctaccactatacacatacactatagtatagtatagtatataatatatagtatataatattaagtatggtggattagattatattatggttaagtgagtccatgagattattttctaaatctgaaaccagatgactcacttgcttccaaggcatcctcaacgtctccttagtcctatcatcaaacgaacaatacccactcaaatactggtttctacaacatcaacacaatttacacatacattagttaacacaatttacacatacactagttaactataattagcatagttaagtataattaacacaactaactatataaataagtgttaagttacatgatgtgtgtttctgagaattggaagttgtctagcttgataatcttctcctgcatctccaagttctccaaaactacaacaacagaataactgagttaactaagttaactaagttattagtggaaggtacagttgtagatctttttgagtctggtgtatctgatatcttcgacaattcctaaagcatagcaattattgtgggaattaccggaaatctttgatatgtaaccgtagacatcctcgttcttcctcatgttcggtatatacaacttcttactacagattattatacacaactgtgtaactgtaagaatagtgtaagtattacaataatttggatttggtgaagatgtgagtgagttcgaagaagtaatcgttggggagttgttgtaggggttcagatttctcttccaaagttcgtaaacttcttaaatattcttttctgaggatttgcggtaactctactgtcacaaatccgtcatgcgatagtttgtcactcaagtaaatcggtaaccaacacttctcaccactcttcaagttactcaacgtaaatccctaaacacatagttaatagttaagtaataatgcgtaactaagtgtttagagaggtatagagcgtaaaaatagacccagagggagctattttactatagttaactttataccccgagagggagctatcttactatataccccgagagggagctatcttactatataccccgagagggagctaattaactatacaccccgagagggagctaataatataaggggagagggagctaaataactaagtcctgagggtaaaaagagtcccattggggtggctaactccgtagaaactagatagttaggtgagtacaagcaccgtaacgcacctcgataagattaagattaatggaatcgatatcgacattggatttaacaacaattaactgctttaaagcgcgatcatacaacatgcgatttatcaaattgtgcaaataatcatactccacaccattcctcttataatcatacacattacttctacaacttctttaccacttatactatttaactatactacagtaatatttaactatactgtagtaatatttagctatactgtagtaatatttaactatactatagtaatatttaactatacttaattattatataactgataaaacttggtgaaacattttagagggtaagagttcgaaattgttgttgaaggattggaggagtgactcgtgtatgaaaaccggaccgctgattacttcaccgccaatgttcacattatctatcacactctccaattcatctatctctctatactcctcttccatactctctcctattccaatattataccatactatagtatagtatagtagttaagtagctccctctcggggtattatttaattagctccctctaggggtatatagtaaattagctccctctgggggtatataagatagctccctctgggtgtggttaactaattgtatgtgtaaataatgtgtttatacggtagggtttaagggtatgaaagtggtattgaaagttggtgagattgacgggtttgagaaagaggtaggagtttaggtaaacagtggaccagttagatatctgacactggttgtccataaggtaacggtaagactcgtaaatctccttcatagaattatatattacacggtttatcgacttttctataccatatccaaactcacattttttaccaatgtcctataccccgtaaggggtcattatagacactaagtaattaactaagtgatcactatagtgttaaataaggggtaaataagacacgttagtgtgtagaaatgtgtaagaatgtgtaagaatgtgtaagaatgtgtaactgagtggagagtactttgaattgttgtatgaattgttgttctaagttgaacattgaaatgatgttattattcccaagtatcatctgatctcttatctacaacattttcacactatctacacagtaactaccccgagagggagctaaattactatataccccgagagggagctaaattactatatacccctaaagggagctaattaaataataccccgagagggagctaattaaataataccccgagagggagctaaataactatatactattagctaaaagaatagtgtgtaatacccagaagatataattgtaaggtttgcagagttcgagattaatgaaaggtctatgtggtatggtatcattttcatcattttctgttgagttttgtgtgactgaggcctgtgacgctggagttccaaagtcactcagtaagcctctaaaactccctctctttcccgatttacccaaagtatacttcagaggcgttaatctcgaattctgagaaccgttcaaatacgactcagaaaacgataaattcgatatcggcgataaatgctctaaatcactatttcaccaatttaacacataattatactaattttaccaatttaacactattatacttagttaacatagtaattaaagaaaataagaatgattgtgtgaactgagtggaagatgtgtaaacctttggatttgttggatttgttggatttgtgtttttttctttttttgaagaaattaaagcttgtagacaaatttttatcattcgatgacattatttaatagtttaaaggagatttggaaatattttacacagaggctcagaaatcattttatctcactggagacttggataattaactcatatggtacagcttaaaataagtaaatacaaattttgtattaaattaacacatttaaattttaacaaatctcgttaaattccagccatttccccatccacatttgattacttcttaaattttaatttattaatgttaaatcttaatttatcatctaattgattttattttacactttagaaatttgtatttttatttttatcttctttacggaattttgaattttcacaattttttctaatttttccagattcctctggaattcacagattttaccttctaacagattattgagtttatagtaaaagtgatagtagagaggatgaggagtaattcgggtagtatgagtcgttcgatgagtttgagtcgtacggtgtcttcagatcggagcatgtcaattgatgaagataacaaatccagacccaaacacacagaatctaacaaccacagaagaagatatcgaaacaggtcacagtccaattctatactcagtagtagaactaatagtagaagtagaagtaggagtagtagtggaagtagtaggagcagtttgagtagttcggaatcgtatgggaggtataagaattacaagaatttcaggaggaaatacacctcaagcaggagctacagccgatccagtcgatccctcaccagtaatagtagtgttagtagtaggagaagtagtgttagtaataggaatagaaggggtctgaggaggtatagaagttattcgaggaacaaatcaccgtatcgcaggtcttttgaccgtaaaactaatcgtagactaacatccagagatagaaccaacaccagacataactacagatacagaactcttagggatagagatactcccagggataaggaaactcttaggaataaggaaactcctagggatatactgagggatagagaaagagatagggaaactcctagggatatactgagggatagagaaagagaaagagaaagggtccgtgatactcctagagatactctaagggatagagaaagagatagacaaagaatacagcagaatagttatagacttaatggtaactacataattatactgttggataatgttaattgtgttgtaggaaggagaagaaggctggaggataaaattgatagaaaatttaacacgccttttctactacgcattcaagctcattcaaacaataacacagttaataccctggataccacggctaataaggaggctaatactgtggagactacgggtaataaggaggatactacagttgataaagttaatactatggtaaatactgaggttaataaggacagtaatgaggttgtggagagtgtggatatggtggaggagttgcatgtgtatgtgtggttggattcaacgttgagggatttggttaatttgattaaggacatttcaccgccaaccaggaaacaagttaacacctggtctttctcaaccgaaatcggtatccgttacggggcttgctaacgcggcaccagcttcccagttatttattacttagctccctctcccctaagtagctccctcttggggtatatagaaattagctccctcttggggtatataattctaggtatatagttaagtagctccctctaggggtacataatttaaggtatatagtaaattagctccctctaggggtacatttaaggtatagttaagtagtttccttgcctaaaccctggtacctttaccttacatacttaattatacaccttaaatagttaattgtatatataatactgtgtatatgggattaggaagtgggatggtggaattgggtaatgtgcacagttttaggccgaatttgagggaggataacagaaccctggaatcactcaaatttcaaatcggaaatcacatccacctcaatttcaaatcttaaatatttttacaatgttttatcaatttttgtgataattttatattttaagtattagtagaatatggtgtaagattctataaaataatctgtaggatatttaagttaaaattattttttatggttgataaccaattaacccctctaaatctctatttccacaccaataaacaggttaactcccttttacccctttaacccttaactatttagttatacaccgaattactcatttatacagtaaattgcttggttatttagtgtaataattgtgtatttattgtaataattgtgtatttattgtaataattgtgtatttagtgtaataattgtgtattggtatgttaaattagcttagaaattccattcccagggtactccctaaatactgttaaccaactattaactattataaataatttaggagtggagagctcgttactgtgagttggacttgaaaaagacgaagcatttttcatgtaacagatatggccacaaccgttcctacttcctcgcaactctttatctaacctccattaagttatatcaactaccgttaacggcagatgacatattatcttggtttagtattatcaaggactttaaaagccttgacgatacacctcaaaaagtcatccccaaatcactaacacacaataagccactagataataagttattagacaataaactaccacacaataagctaccggacaataagctattagataataagttattggaaaagttaatgttggatgtgcggagtaaatcgatgtttgagtgtgctgtggaatcggtggcttcaagggaatatgtgatgggagtgacatttcccgtaccggagctgtgtaaacaaagcatctgcaacgagtttaataacttagtctcactgctaaagtgttataaagttgaaggtgacaggggtaaaccgaaacccgagcctcagacacataatgaacaactcacactacaagatttgttcagccacgtcatgaacatctcacacaacccgatttacccctttaacactcacactgtagattctatggagaatactgtagacattgtagacactgtagacagtgtagacactgtagaagttggtgtggaaaatactgtagattctgctgctactatagacaatactgtggataatagtttagacactatagagagtactgtggataatagtttggacactgtagaagatgtggctggtgccgtgggacctaacgccgtaacggaggacatttccaagttaatacaaatgaacaataaaaagtacaacaaagtgtacaaactactcaatcacttcattctcaaactcagagattcaacggaagaatttggtcccacctgtgataatattccacaagattatgaacacattgctgcagtagatgtagatgaggaagaaatttcgggactgttgaagatatgtaagagtaacgaggaggtgatagaggaaatgtcgagaggtttcaggggcaacgcccgctacagaaataacacagaaaccttcatcaacacattcaatcacctcttcaaacaagacacgtttcacaacacacaatcttatagtaatagtgttggtagtggtgatagtgttgggggtgtggagagtgtgtctgacgatgacgtaaacagtttgcaacagtattttaggcataattctctttataatttgacttcgtttagggtacgttagggtctccgttacggtgcttgcttccgctcacacagcttatttactcttatttagtcccccaggactctctttatctcctcagcctttcttatttactcctcagttatccactctagagcttaattatttacttactgatcgtttgtttacaatttttacgcttaattttaccataaactccgttaaatattgtggaataagaaaatttgtaggaagatgaggagtgtgtgttggataagggtgtggacttgagtaagatttgtaatgagaggttaaacagtttactgaggcagacggagcatttagagcctgaggaactgttatccacgctttccgtgtgttttgagcaggagtcgaaatcctccagtgatctcgcgtctttgattagaatttgtaccataacgccccaaaacaccggggagacactttataaatcaaacagactataccaagtcaacggcacatacaacggacaatacatcgacgtcgtctacaaatacggcaaaatcatacccaaatccaccctcaaattctactccaatccagaacgtactgcgaacctagttatccagttatttgtgtaattatgtagttaattagataatgataataataatttgttagatccgatagtactgagggggaatgagaagatggacgtgaatatggagatgatagagcgcatatttagtaaaaactttaatcagtccgacaatgtacaacttatactacaaaatctcaggttgatagactccaagttaacacgagtggtaaaagagtatgagaacatgcacatggcgatttataagtatgtgaacacagcggacagagatttaaagtgtaagaattatgtggaggagttggtaaacctggaaacgctccacgtgatagcggaaacactaatgcaaactaaattaaagctaataacccaagtgtataactattataatacgcaagttaacttactggaaagtgttattccaaggaaatactttcaaatcttcaaggaaatattctatcaccaatatgaacagttttaatactccacacaatatacaatgtattatatatatactatagtatagtagtaatagtagtatagtattacgtgtctgggtttaagggtactaaatcaggcgtatataacatagtataatgactctattatacattatttaggcttattataacagtgttgagtggtattaagtgttaaacagtactgtaatgagtgttatcctagtgtatactaaagtatataatataacctagtatactcctaatactatacatatacatatacactatagtatagtatatatagtataatatattagattaagaattagtggtaagagactttgaccatgttgaagttggtagtgaaaagagttatttgtgtaaaacggtaattctcgttttaaagagataattgagtgatatggattaacctactccatctgtgtgtttccaaactactgtccctatctttaagctcagtacaaacttcattattaactatgtatatgaaatatgtttaactatgtgtatgaaatctgtgttggagttatttcctcattggtagtagatttagtaatttgggacacatcaatctagacaatactcttcaggccttaaccaactcgtaatagcattttaacgagttaatttacgtaatttaagccttaattaatgtataattaagcttaaataagtgttaatttacccttaatttagtaaatatattacatacattatatatataatactatacaaatatgtatatacatatgtataatgtatataatattaaacattaagagtttagaatatcccagaaggacctgtaagggatttgccagtgatcggggttaaatttatcttcatttacatactcgtgacagtacatcacagcctctaaccactttatatgcaccttcttcactccatccatcaacaaattacttctattattcactatcaaatgcgttatcccattcacattttcattagtattattgtcattattactattgtcattattgtcagtagtattggtagagttaattgatttacgtattgtggctccgaatttggacgcccacttgccgaaatctgagcagagtagaaagttaatttcctccgactcggagtttaaattacttaaattgataaactcgcacgtgttggagtataacacaacgttctccagcaccttctcacgaagctcctgtaatatcctactcgcactcgggatcataccaccgtccaaccactctctcaaattctcctcagccaactttatctcagtggtgtcattgtcattagaaattagagcgtggaactgttgaaagaagtgcgtgtgtatttgatttagcaagttaacaattttatacaactgcttgtcattgtcgattatttttatcttttttatctcatcagtagtacaacttgtgtaaatattgtcaggacgctggttacatatcaagtagccgttgtatctaaagtcgcttctcctcatcaactttggtatcacaaacccatcagcgtctctcaacacattgtccacatcaccaacactattgacactattgacattgtcaacagtatgactggtggacagattggcgttgtgtatgagtttgtgccatgtgtggttggagtagttgcagattgactgtagtgatgctgaggacttggttaggttattgaggtcgtagctgttgaggtatgacaagtcggagaaaaagtagtacgggtgcaccttaattaggcctaaattattagtccagacatgctccgtatcatccatcaccaacaccaaattcttataatttggaaatatcctgtccaacgacttcatacaatacctcaaatcgttacgcaacttcttcaccccaaccacattgctcaccgagttcatactgtttactgagtttacactgtttacactatttacagagttaatagagttagtagagttgtgagaattggtgttgtatctggagaagatgcgattaccgaagtagatgccttgtgggtcaatgacttgtagagcgctagcggcatgttgtttagtgcccatagtgaacagaaataaccggaacttatcactaatcttatggaagaattggaatatccccggccttagtttgaagtatgaaacacaatatgaagtctcagtctcgttgtagacaatggttttgatgacagagttttccagtttctgttgtagctccagtgacacactatccgttccatactgtacatactgattaagataatctgcggtatcatagtttagaattggtattgcgatgtccggcggcggcggctgtgaagtggcgtgtaacaacgtgttatccaagtctaacaccagacacaacttaccatcagtcaagtaattcaatatctcaccacactccatcctactcatcacatcaccacgaattatcatcgcatcgctattactcaggaatccggcactactcacactcatactcatactatccatactattggtatcagacgattcggaaaatttccgcttattgtcaatgggttgggagcaggaggtgcagagtccgtggatgacaatgtcgtgattacagtcaaatggttcaatacggccaattactgtttcacctcttaattcactcatgttctcaactaatctcaccagtattccacttttaggactttttatactgcgttccggtgcatggatcgcatagctctcagtattctcctcactattctccacactattattatcaactgtagtattatctgtagtatccgtagtatccttagtattattatccgtagtatccttagtattattatctgtagtatccgtagtaactgtagtattattatctgtattattatctgtagtatccgtagtaactgtagtatcaactgtgttatgagtgttaactgtattattattatccgtagtattattgtctgtattatctgtagtattagagttggtagagttagtagtggtgatggctaggatttgatgtttggtgatgtatgagttgttggagacgatccagatgagtttgcaggggaagagagaggggtctgaaacagtaatattcccatcctccaacgacgattccaagatcctctacaccattattcacttaattcacagtaactaagattatacagtagttaatggtacagattattgtatagttagtaaggggattcgaacctggtacctccaggtcctgggaatagcatttatacactgtactatcatagctaaaacgcgggtgtatagttaatttgatatatattacagtggtatatatataattaagtatataaatggtatataaataactgaataaataaatagtatatagtattggaaacctctagatcatctgaatccattggtaaaaattgtaatgttagaattacaagttaatgtaaaatttgagaacatatttagtactaaaccaaagtataatacaagataagtaaatttagttgcgatagtattaaacaagattaataaaatattatactacaaatatattaattagggaaacatataataatagaattaccaagagtagtggaagtttgtaaggttaactatgaaaaattatttcaaatctcataaattttgtaaattcttttaaacataaattagtttaaaattaatttattacatttaaattactttatagtataatttatataattacaaatcttagtaataatttggttagttaagtattatctggtttacggctaaaacagggctaaaacggggataaaacgggtataaaaatgggtaaataagagttttacataggctgagatgagaactggtaaaaaaattgtctggatcagttggtccgaaattggctgaattagtgtcaatttcatcattttaatcgtcgttttacccatagattcctctggaggatttgaaaaaatatttttttatctcaaattatttgatttgaggataatttgtttaaggtttgcactgggaaatgctgtcaagggtgcactggctccatccctcaagaatctcatcagatttactctttttcacgctttttttcacatttttacagttttatcatttttataaattatctcaccagtttacttttttatatctactcatcttgttaattatttgactgtgactttttttgacattggtaaaatagttaaaaaatgtttttaaagttatttttaacaaattacgacaaataattaacttttaactcatttttcaacctttaaaaggttattgtacggtttatccaaggagatctaataatactctatccctcaccctatcacattattatatcacaagtaatattattattagtataacaattctgcagatgaactatgaaatgaatggatataccgtagattacacttctacaacgggtaattacgggcctaccgtagggaattacggatctactgtgggtaattacggatctacaatggtgaatggatctacaatagtaaataagaagcgtaactttgagaatttgcagagatctattgaggcgcataagaatcgtttagccgtagcaaggttaaaaaaagctctcaatagtgataatactgccagtgctatgaagagtagggagaacactttggaccataccaaatatacaaattattccaccaaattgaaacctctcaccttaaacgttaaaaaggagaaattggctggaaatcatggggaattcgttggaaatcaggagaaattggttggaaatagggagaaattgggtgagaatatgtatgtggaagacgagttggagaagaagatagtgcaagttttgggtaaattattaaaaagtgatctgaaacccttacaatactcaaatattaactcaagtaacttcattaccactttagttaattatttactatagtattatagttagttaattagctccccttgggagtcccccgcctcactactatccgggccaaatttcgcttgactttgtagttcacactagatattactataccaattgctctattccatactattatagtattaatattataatgttgtgtataggggaggagagtatgagtgacatattggtgaagtgtatatcgacggctgtgaattcggcaacttgcgattcagattttggcacttctcgtactaataataacctcaacctctccatcaacctcaacgtcccaaccaaccacatgaaccacaacatcaatctcaaccatctcaaccatctcaacaacctcaacgatgtcaactctggcaacagtgtgaaccgtgttgacggggttgataatgtggaggaaatgggagtggtaatgattgaggacgtgttttcgcaggatactaaacctgttaagcctaaccctttttccacactctacaacaagctcaaaaatgtattcaccaaaaagaataccactagtagtaatagtaataccactagtagtaatagtaacactaacactaacactagtagtaatagtagtcctagtacgagtagcctgaagagtagtaccggcgccagcgtcaagagcaaatgcatcggaccattcagaagagtcacaaaatccaaacacaatcccaaccacaatctcaatcgtaatctcaatcgtaatttcaactacaatctaaactatctcaacaatgtgaataatctaaaccacaatctcaacaatctaaactgcaatgtcaactacaatgtgaatagtagtaatgtcaattggggagactggcgtgtttgtggtagtgtgcaaaatccgcagtctagagcacatttagcgccctttaaccctctcaacaccctaaaacccgttaactacactaatcccaatactaatattaaacgtgtggacacattgggtacggtgtgtgggtggagtgagagcgacgtctggagtaacatgaaaaacagtaaagaatacctacagtccatcgactgggatcccttcaatctcaaattcgccaatcccaactatgtaaatagtgtaaacaatgtaaatagtgtaaactctggtaacaatgtgaacaatgggaatggagtggacatggttaggcagaacagtttgtataatgggaagtatgggagattagtactgaggaatgggtatagaaaggatattacgcccattaacccctgcacatttaaacccattccaccaaataatcccttcagtcccatcactaacactaggaatattaattggaacaccaggaatattactggaaatgataattggaacactggaaatgactttaatagtggaaatatcaattggaaccctggaaataattggaaccctggaaataattggaaccctggaaaccctgggaacagtgggaacagtagtgggattgacaatttggaaggtaatgttgtagggggaatgagtggattgagtagtggtatggtgagtatggaaaagtatttggagatggcaagggatagatacttaagctttgaccaaagcgaacaccaaaacacaaaccataccctcaataacacttctaacattatcaacactatgaacactatcaacactaggaacactatgaacattgggaacactattaacactaggaatactaggaatactatgaatagtatgaacattgggaatagtatgaggaacactgggaacactgggaacaatccgtttagacgttataatcccaatcaacatctgagacagtatgatagagaatgtgatagagaagaagaagaacttagtgaagtgacgccgaaatttgagagaagttacaactgctttgatccttgcttcagatacaacaccaatcagtcccgtcaaactaagtcaccttaccactcagctaagtcaccttatccaatgactaagtcaccttatccaatgtcaccgtatccaatgactaagtcaccttatccaatgactaagtcaccttacctctcagctaagtcaccgtatgagtcatttgtaaggaataatccaccggtaagtggtagtgggttggagagggagggaggagtaagattgatggacagtggtacaattttcaaaacgctaaaccaactatcacaaatccaattatcctcataaccctcaccaatccacaattttcaataatttcaataatttcaataattttaattttaaccttaataattttaattttaaccttaataattttaattttaaccttaataattttaattttaaccttaataattttaattttaaccttaataattttaatttcaataattttaattttaattttaataattttaataatattaattttgatattaataatttgaaaaatgtgttggtgattttcggacccaacatggtatttccggaagatgaataattttagcaaattttagccaaaattaccaaatttgtgatttaaaattttaaaaatttggatatgatttaaggttttaaagatggccgaagaatcgtccggaaacgccgagctattcgccgatgacactgcggaacaattttcatctactgccgaacaattctcatctactgcggaaaagttctcagctcctgtggaacaattttcgcctactgtggaagaagttcccaggcccaaaaggggcagaaagctaaaaaaacaaaactcaaaaaaaagaaaaatcgacgtctcagcgttcctcgataccgaagctcaagtatctctacacagatccatccaaatcttcacatttacttactctttcacagaatttacccagatctaccccttaattactcaataattactcaataattagtcaataattagtcaatatttagttgtagattagtcagatctatgtattggtatggtaaaataatgtgtaataggtgggagatgacgaggatgagaattatgaatatgactttttattgcctgatgaatctactgaggctgaacgtctagaacacagaagtcgacttaaacgcctacaagaagagaagttagttattccgttacggtgcttgctaccgctcacctatgtagttatgtatttatcccctctatactactttatattatctatagtactttatacccttagtacttttactacttaattatatccttatactctttagctatatccttagtatattacttatactccttagttatacccttagtatagtactttagctatattaggaatagtacttaattatactcctttattatacccttagtatactttagttatattaggaatagtactttagctatattaggaataggtagtgttactatagtacttagttactccctactattcactctatttgtactctagaggactccttatatccttactatatccttagaatcccttactatatccttagaatcccttactatatccttactatagtactaataatccttaattatacccttatactccttatatattacttatggtactttattatacctctagtatccttaattatacccttatactccttatatattacttatggtactttattatacctctagtatccttaattatacccttagtacggtactttatctatattagctatgttacatggttaaaaattgattatgttttaataattgacaggagagatggtaggagggttggcggtacgcaatacctcgaaagcgccattgacaaactcgccaaacgatatcaagatcaaaccttcgaagaaggcgaagacgatcttcaagacacacaacccatacaatgtatacacaccagttacctcactacacagttatacatctgtacacatctctacacagttatacaaatgtaattatgtaaataatgtgattaaactgtaatgatagatgacgggattgaggagacgagtgcgttgatgccggatttgggtgaccctaagttatggctagtgaggacgaataggcagactgcggaccgtaacttggcgatttcaataatgaacaaatccctgaggtaccaaagtctgggtaaaaacttggggatttactcctgtttcgtgccagacggagttactggctatctctacatcgaagccgataataaaaccgtcgtcaccgaagcgctcagtgaattcagacaaattaacctcaacacactcaaattagttccaatcaatgaaatgtcaaacgtttttaccactggtgcgttacggtgtgaggtccgctcacacatttattacttagttttttatccccctagccaccccaatgggactctttttgtcactccggggatatatagttaagtagctccctctccctctacccttatattattagctccccttaggggtatataaattagctccctctaggggtatatagtaagatagctccctctgggggtcttacccttagcactttgttactttctacacttttatttacaccgttacgcagtttattacaacaaacttctaatttagttaaaaatatgttaacttgacaaattacatccctaaaaatgtaatttgtaggctttgagaatgtgtatgtccctagggttggagagctggtgagggttaaatttggccgttactccggtgatctaggccaagtctacgaatccgacgaaaactcgtccacagtcacactcaaactcgttcccagaatcgatcccactctcctacacacagaacacgatgtcaattctctgaatggtgtagactccgtaaatgtagactctgtaaacggtgtaaacagtgtgaacggggtaaatgtgaacaatgtaagctcaggatctaacgccgtaacgcaaaataaaaaaaagtataataaaatgatgtttgatagagagatggtggagatgaatggtgggttaatagagcacgggttgatacctggtacgttccgttaccagggcatgacgtttgtggactcaggtcacattttactaaagttcagttccaagcgtctggtgactcaggattcggtaaatccaacactggccgagctgcgtgagttctcaactgacgaatcgcttagcgaagtgttatcccacgtgaccagatccacaggcgctaaaagctcactatacaaattgggagacagagtaaaagtaattaaaggcgaattaacgagtgttactgggaaaataacaagtgtcgagggtgacgaagttgaagtccagcctgacgactcggagttgccaaacttcagaatttcactaaattccctcattaaaaacttagtggaaggtgacaacgtaagggcaattggcggtacaaatgaagggaaaactgggctaatagtgatggtaaaccctaagaacagaagtgccctggtattctcaccgcaaaccggtgaagagtttaagtcaacactggagcatttgtcgctgataccccgtgaaggcctgggcgacgaagccaaagtcggtgggattaacggatttgtggtcacagacttggtccaaaccactgaaggtgacgtgggcgtcatcgtctcagtggacaggaacggctccgtcacactgctgactgaggataataatagaataaaagtgactccagggcaaataacgtgtaaacgcacctctgtaggcagcagtagtcgtgacttcaataatcagccaatagaacccagacaacgggtaatggtagtaaaaggcagttacaggaataaaacaggacaagttttacacctctggaggaatacactttttgtatcactcgagaatgatgtcatagtcgtggcctctggcgactgtttaagagccggtgcagctgccactactaaacctaatcctccgacgggaacggctaaactagtgaggaagaacccgttaatagggaaaacagtgaagattttacagggccggtacaagggactgctaggtgacataatccacgtagagcccacacaattcactattctactcaaggttaaaccgaagactgttaggtacccaaagtcagactgcgttgtcctagacaactggcatcaaaacgtcagataccctcaaaacaactctttcatcaatagatttgatagaggtgacagtattagaggtgatagcagcagatttgacaggggtgacagaggtgacagtagtattagaggtgacagcagcagaattgatagtagagttgacagtaacactggtaacactattagtaactcaacaactataccaattgcaagcaccgtaaaggaaatgaaaaaactatccccgtggtgtgttgagggagtggtagtgagagtgacggggcctggtggatattacggtaagctgggtgtggttggtgaggtttttgagaacatggtagacacttccttgcaggtgttacatgttatggttgaggaggactacatcgcaatagcagcagaatctgtagaaccagtgcctcccaccaagtcaggagaacaagccctagtctacaccatggggaaagataagatcggaacagtactgagcatcaccggagataaagtcacagttaaactaacagacgacactgtcaccgtagataaaaaggataccgcactcttctcaaaatagatttcaatatacctcaatttttaccatatatactatatacatatagtattatctgtagtatagtattatctatagtattatccatagtatttagtataaataagaatatgcatataataatatatatagagtagtttaactagaatactatagtatatataatacataaacccagacatctagtattctaatactatacttagtactatattatacctatagattgactatttagaatacctaatagtatttattatacccaagaatactatagtaatacttaaacccagacacgtaatacattctatactatatatactatactactaatacccttaatactattatacttagtatattgctgtatatactatggctaaacctaggcacttacacctaaactattatactactgtaatatactactaatacccttaatactattatacttagtatattactatatgtattatactcttaactacctagaatactgtagtatacttagtatattactacatatagtaatacctaaacccagacacgtaataaataaaccctaatactatactaaatacctaagaatacaccaatcagagtactatactaactaatacccttactattataatattaccatactactataatatatataatatatataatatatataatatacataatatactatacctataatactatagtaatatactatgtataatataatgtgtatatagagtatagtacattaaagggttaatatgagagtatcctatgttacatgattgttcatttgatattatacgtattcggaccagttatcggatgaatctttaatgtgtacgaaaaactgtttctcgtagtagacgtagattatcccgtcctcggggtagcatgtaactgcggttgggatcatttcatcttgtcttaacttccaaataacactactgccataggcgattagagaaaagtcagttccaggtttcaaattataagtaaagccgttaaaaggctcgagaagaacattgtagtcacagggttcaatttccgaaacggtactgaaaaatgacatgtcacagagtctgagtggtggtaatttaaacctcctccgagtccagcggccattatccaagtaacacgcgatcaacacatcttcaaaacggaatacaattctcttatttctcttgtacattagtgacagaggctgtggacgacctgataaccttttccaaagtgttttcttgttatgttttatcgagcccagggttagcttattcctgaaatcaatcaggaaattatcaccttcagcgcttaaatcgtattttgacgtgcttattcgctcgttacttttatctaagattaaaagttccctagggatcctgatggtagttcgagtccactcgcccagctccttcttacaaatgataactttgtcatcaaatttaattgtgacgatgttgttcttcttgtcatggactacggacgtggctttagagtcgtcctcctctgaactccacattgggattttatccttttttccatcaatctcctccggctccttaagcttttcttcatcagttttaaactcgctgtttaacgagtctgtggtctttggattcgcacacaagtccatgactctggtcagtttacgcactttcctaccggccgcaaagttgaaagctctgatattaagcggcttaacgcgctcgttcttgtataaaagactcagtgagttattttcatagttgatcagtagtcctacggggaatccaaagtcgtcttcttcaaagtaacgccaaataagactcccgtcgtactttaactcgaaacactcaatgaaaaacattattctgaggattacgccctggactttgagtcggtggtcagagtccaaaaactcctgggaatcctcgcccaggaaattcaaattactaaagttaatccgtaaatgtgtaatgtcggcccattcacctgagctcctccacccaagtaccaccggctttaaccctttaagctcaactctgtactcctggaaatgctctaaaggtactaattccgcacttgacattgcagtttattaccactaactccacgctcatcgggcactttactcaccaatccattcttacacattcacacatattttcacagtattaaacaaatacgtcaattatccaataaataatattataacactgataatgtgatgattttatgcctaaatttgctaataggagttgattttagggaatgtttttacccaaattgccgaattacacagtaattatacccctaaaattaatctaaatacgacgaaaatggatctaatttatcaaatctaaatagccaaaatatagccaaaataatgccctaaaattgctaaaaatattactaaattacgtatataaatcgtgtatataataaaaaatcatgtgagaacacgtaggaatcaagattataaattattattggcgatttgtgtgagttgggatgggacggtttggttaactttcgagagtagttttgacaagtcctgggcgaattttacctttgcaggcgtcaaagtgtcaattgggaaatataacaacgattcacccttactgtttcctctacccgttcttccaattctacacacaattccataccattcgtataataattgtattgtaattgtataattgtatagtaatattaagtatatgggtgatgtagagggggataggaactcgtggaattgataactaaggtgagcggatgcaagctccgttacggagtaaggtccgctggtaactaaacccttggaagtcttaaatagataaatgagtaactaagtactcagggtaagagaccccaagagggagctaaattaactatatactcttaactatataccccgagagggagctaaattaactataattaactatgtaccccgagagggagctaaattaactataattaactatgtaccccgagagggagctaaattaactataattaactatgtaccccgagagggagctaagtaagtggtaaataactaatactatggtatgtaaattaggaatccctgggacaaaaagagtcccattggggtggctaactccgtagaaactagatagttaggtgagtacaagcaccgtaacgcacctgtgaatataatctaaaagagatttggggacgtctaagttaataacgtagtcgatgtctttaatatcaaggcctctggcggcgacgtctgtggcgacgaggacgttgacatcgccggagcggaacatgttcaggatgcgttcccgctgagcctgagtcttgttcccgtgaagtgaggctgacttgaacctgcggtaacgcagggcactggtgagttggtcagcaaatgacttaaggtcagagaagattagcaccttcttctctggcggaattgagcctaaaaagtcaaataacttatcccgcacttcgtaagagtttgggaactcaacattctgccttatgttcggattcgccgttaactccaagtcgccaacctacacacagttaacattatgcaaataaataagtagttaaagtatgttgttaggtccagggggactacagtagagtgcaagctccgttacggagaaaggtgcgctggtaactaatcctctggagtcttaaatagataaataactgtaaatctaggaccccgagagggagctatctaattataccccgagagggagctaaataactttataccccgagagggagctaaataactttataccccgagagggagctaattctaatactattaactatctaggggagagggagctaaataactttataccccgagagggagctaattctaatactattaactatctaagggagagggaggtaaataactataggggtagagggacaaagagagtcccattggggtggataactctgtagaaactacataaataagcggtagcaagcaccgtaacggcgtacctgtatgtaaatagagtttgctttacagaattcggaggctaatcgtttaatttccgagggccaggtggctgagaacatgagcgtctgtctgtcaggcctgatttgtcctacgattttcctaatttgtggttcaaatcccatgtctagcatccgatctgcctcatccatgacgaagtaactgacgcgattaagcttaatcgtgccgttactgaggaactcaagtaatcttccaggcgtggctaccataatctcggcaccgttttggagttccctgacctgagcaaatttagaagcgccgccataaattgggactaatcttagattcagtagtctggagtatggcctagcttcttcggcgatttgtagacaaagttccctggtaggggataggattaacattattggaccgccagtaccaacaggtggctgagccagtaaatgtaatagcccaggcagtaaaaaggtcaatgtcttaccacttccagtctgagatacaccaattatgtctctacctaaaatattattagttcagagtataactatgggataattaaggacacaggggtaaaaagagacccagagggagctattttattatataccccgagagggagctactttactattcttaactatatacccctagagggagctaaattaactatagaattatatacccctagagggagctaaattaactatagaattatatacccctagagggagctaaattaactatatacccctagagggagctacttaactaatacccctaaggagagctaataatatataagggagagggagctattttactatagttaattatatacccctagagggagctattttactatagttaattatatacccctagagggagctacttaactatatatccccggagggacaaaaagagtcccattggggtggataactctgtagaaactacataactaggtgagtacaagcaccgtaacgcacctgtgagacaagaagtccatccaactttttgtatgggagttggttcagtaaaatttgactctttgataatattttgaatttgttgattaaaaacagcttcatcaaaggtggtaacgggtttcgggagtggatgctcaccctcgataataatattatgcgcctttaaaatccgctcaatctcctcaccaggcctactgtcagcctcgtaactcaagtcatagaaatccttctttatctccaccaactcctccttgtcccaatctatcgaagacaccggaatgtcataaccacgacccacagcatctacaacattatctatactattattatatttataatatcattataatttttatatagtattggaatggtatggtctagtgaatagtacacattccggatgaactccaaagtcaagcgtgaattggcccggatagtagtgaggcgggggaccgccaaggggagcttagttatactattactatactacagtttactacaatattaatactatagtaagttagaatagtggagtgaaaccaccaaatctactatgaactccaaagtcaagcgtgaattggcccggatagtagtgaggtgggggactgccaaggggagctaattatatataactaatactacaatagataatactagagtgaagttactgttggtattgtagaatcgtctggtttgtctgaaagtgttgtaacgatttgcgtaattgtacggtcttggcctataaccctgcctcttcacatatcccgtaccatatcccgtattgtacccagtaccactaccgtacccagtactataccctgtgttaccactaccataccccgtactatacccagtgtttgtgtcaaaccctgtgttataccctgtaccactaccatatccagtactataaccagtgtatggagtggtgtacggagagtaatttggcacagtggtatagtttggactcagattcggagtatatcccacctgatacggcgctgttaccgtacttatattatcataattgccaaagttacccaaacccgttttgaccctagatgttactctgtttacagggctaataaacgtaaaacttggtatagtaatactcctcggaatggtaatagttggtatagtaagacttggtatagtaagagaatgagtgagattccgtggaatagtgagagagttggtaatgttgagagaatgtgtgagattccttggaaggctggatgagagcctgtggagcgggtttagggccattgagtgtgtgataaaaatagacagaagttgcgataaaaataacattagggcaagatcaagaacatttccaggagtaaaaaatacaaacatttagcattgacaatttattacttacatttcttaaataacccttgtaatcacaatgttgaaaatttcctgtaaaattaacttaacaaaattaattaaatttaataaaattattttaattaaataaaatattaactcatggggtgtagccaagctcaagattccacaatattccccccgttccctcaatcaaactattgtatactagtgtgtaatagtgtgtaatagtggtaaatattatatattagagagggattggggagtggagttatgtctgtgggtgcattctttgatgaattgtgttagcatagttttggcgattgtgttgttgaatgtgtttgacaggtgttggtaaaaagggtttcgaaatcggtaacaaattgaaaaatctatcgcagttccgctctccaacgccgataaattccaacgcgtatccaaccgctcaaatatctcactatcatacgccatcgcctgttcaccattgttaactatttacatagtaaatatgtgtaaatatgtgaataagtaaataggtagagagaggagaaaaatacgttaatgaagttgtaaggttgaaagatgactttggagacgtaggattctttaaataataagaaattaacagtcaaaagagcgtttctaatttttgtcccttcatcattaatctcacttttttcctctgttttcgcctcatccagccagttactctcctgtaaattgtataattagttaaataataataataagtgtgatacatggcagaacggtacgaatttgtgatagtttggaatatcgatgatggtgtcgtaaattatttttacgggcagattcactaatttacgcttcttatatattaataactcagtgtttaatcccaagtttatacccctcaatatattataacccttaaacatcttacactaccatcactacattacaattattatattacaattatattacaaatgctacgttagattatattaataatattacaatattatagatatgaatatggtaaatagtgtttggagtaataagtggtgtagaagtgagtgttggatgggagcgggcatggtctagtggttatgacgcctgcttcacacgcaggaggtcccgagttcgagcctcggtgcccgtacacctatattccactctcttttcacatcttttcacatttttccactttatctcactttatttcacgtttcataaattatttaattatttttactttatttttattaatcaattatttaattatttctacccgtgttatactctatggcatatattacagtggaatccactacttattactatatacttattatactatagtataatattagtataaataattgaggaatgagataaaaagtggtatcgaggggattaaagggaaaaaggagtgttttttatgagcgggcatggtctagtggctatgacgtctgcctaacacgcagaagatcccgagttcgatcctcggtgcccgtaccatttaattttaccactaaaattatttaatttcactttaattattttttattttattttatcacaaacaagttttaattttatttttttacaccccaatttacactatcaatctttctcacaatattcacaatattcacaattttcacaataattataatatttattaataatattaataatttgttgatataaagtaatatttggatgtgtataaagtgagataatatttgacagattgaaaagatggaaggccgtgagatgggtttattatttcgtaaaggctggtttaccaggaggattttcagcacagtcttactctttgtaattgccgacgctttcgttaaattgtaccacaccctaaccttaatactagattagttaataatgtattagtgagtatggaatacccgtgaagactgatttcggatcctcaaattgggaatactggaacgataaaaaaaatagacaaaagtataccccttactactttactatacccctagagggagctactttactatactttaactatataccccaagagggagctagttagatatacccctagagggagctacttaaatatatcttaatttatacccctagagggagctatcttactatacctaactatatacccctagagggagctatcttaatttatacccctagagggagctacttaaccatacctaattatatacccctagagggagctaaataattatatactcttagttatataccccaagagggagcttaactatacttaataataatagtataataatagtatgatatgtaatgtgtattaggatgttgagtggaaattagccgaagtatgcgttgatgatttttctggtgtttcgtatatttgggttattattcactggcggatcacggatcctacggattacacaatcagattagattattacctcaattgatgacctggcatttgcctttgtaatttcttcaaatcactcctactcacatactttatacgcttcttattcttgtacttctgtctactctacaaccatactatacactactaccaactatttaactatattaactatattaactatataatttagagtaattgtgtagagagttacgagatgtaatttcttggcgtttctgccactttggagtcgctcccagccaaatctacacaactcttactactccagactaagtcaggaatgaataactaaacacccaagagggagctaataatatacccataagggagctaataatgtacccctagagggagctaatagtataaggggagagggagctacttaactatatacccctagagggagctaataaactatatgcctagaattatatacccgagagggagctattttactatctaagggagagggagctaataatataccccgagagggagctaaattactatatacccctaaagggagctaattaaatatacccctagagggagctaataatatatagcgagagggagctaataatgtaccactaaggagagctaataatataaggggagagagagctaataatgtacccctaaggagagctgagtaaactaagtgttaagggtaaaaagagtcccattggggtggctatctgtggaaataactaagtgagtgcaagccccgtaacggaatacctcgtaagtctaaacctcatggccacccggggatgatttttatgtttctttttcgcgagtaaaatctgtttaacgcgccatttacgcctgattccagcccagtcaacgttccgatccggcctataataccttcgaatctcccttatcccggccaaattgtcaattttcacattaacccgcgagagagtacaaatttgacattgaaaatgcaattttttaccaatattacaatttttaacattgttaacaaggtggttagagaggaaagttggtaaattcgggtgtagaatctggcagtgtaaatttttggaataatttttaaaaaccttaaaattattaaaaaaacagttaaacataataaaaagatgattggagtggaaatgtgtaggaaataggatagataagattagtggtgtttggcctgatagaggaagaaatcagattaaataaataaaatccctgtataatagaagagatattaagatataattgtctattcgagggtttaggaatatgttgtacaatatgtaattcatatgccagatttaatacactccgagtacaaattcacgccggattctcaccccttcaatcggaaaattttacaaatatttaaatcgtcagaaacttctaaatctatggaatcgacaaaatctatagaaaagtataaatctttggaaattcctaaaattgtggaaacttctaaaattgtggaaacttctaaaattgtggaaactcctaaaattgtgaaaaagtataaaaatatgaaaggttctgaaactgcgggaatctcgaaaataaacaaccctgaaaatgaaataaacaatataaacaaaaataataaaattaataaattggataaaatggataaaacatttaaaagaaagagaagattgacaaatttgttaatttttatttttattcttttatcatatcctccctctccctctctttctatctcaacattgttaaatcctctctcaaagttgttgcctaaattattctgtgagtgtacggatctgaggaaggacgtgggctccgattttgagccgtttctggagactccgccgaagataattgacgactcggtgatggaggagctcgacggactcgacgactacgcacaaaacgaaaatgaaatgacacacgccttcaccaaattcttcaatccccccaatcttaacctcgatatccccctcaaaccctttaataccatagatactcttagtactgaggatactcttagtactacagatattgtggatagtatagatactgtggatactacgggtactatgagtaaagagggaaaaatacgtgcagttagtgacactttgggtcaagtggatccgtttgagaatgaatcagatttacactttagaaatcccacggacgacttagttgactctgaagctcccagggtatcgccattcagattcacccatcataaacccctcaatcattcggacactatagattctatagatactacagatactatggatagtgtggataataacttgggtgatgctgtggatggagaacccagggtgtgtccgtttgggttcaccgatggtaaacctaaactacactccattgacgatcttcatctcgtagatcctaatgactctatggactctgtagatcctgaggatactgaggaagtagaggaactggaggaagtagaagaagtagtggacagactggatgaaaagcagtttgaggaaaagatcttgtatgtgatcacctcgatgaagcgtttaaagagggaaatattagagaagaacatggagttggatacgcttttcatgcaagttgaacatctccgtgtggcactgtcacagcttgacaatgtgttttacaagagtttatttagtgatttggagactctgacgagggatttgaacttgctcaggaaagggaacatttactacactggagatacttataatatcctcaataacatcaccgtcatggacgccataagagctttgtttgtcatttaccgaaccccgttcattgtcctacggcataactttcccatctaccagagggtagaactgtttatctacaatttcctaaggtataaactgcccaaatttgtgtatacaatttatacaacggtgtacagagtgttgaggagggggttccggtacctctacaacaacgctataaaattcatgagaaacacatacatttaccacagtgttaacaggaaaaccattagcatttatgatcttttgctcacagactacctcagggataaaatgaacacacacgtggaccaagttgactattcagggactaatcccattgtcatcaggttgataaagatattaattaggttaaaaatggtgaagcattataagtatgtgaggtacggtgtgtttaggaattcggtgattgcaatgtcgtttttgaacaggaattacctgtcgataatggacagtaatcctgactttttctacattaagcacaaggaccacatgactgccgaggtgctctactacatttataaacttaagttcctcagctttatggaactgttcgcgttgtttttcctgagatatttctccatagtttgtaatttattcctacaagaccaggataaactttataataaatactctaagccgctgttggacggcatgttcaaatttaagaacttgtacttttttttacgagggatttccattattgtattgcagagagtggacgtgtttatggattactgcttcacgtacgctaacaaagttaacccggaactctccatcctagtgcccaaagacttgctaaatcggatcttcttcatttctgtgattattttactcacggtgctgtttgtgtttttgatacagctggtgtttcacattttaacatccgtagtctccacggtgactgggaacaccagtagtaagaacacactgagctcgcgtctgaggcactggtaccacagatcattcctgagacacttcttccagttaatgaaaaagacactctcaggacacgggaagtcacataaaaggaagcacaggtatcatcggaactttgaaagctttcacaggatcatcgatgatggcaatgttaccaattctgacaactataagcccttcaaaaataaagtcaattgatcacatttcaatctattacacattttttaacatactatttatagtatttgtagtatagtgtagtagttagtagttagtatagtagtgataggtgtctgggtttaggtggtaaattgggtgtataaatactatagtagagtactgtttacagtgttttataacagtttagaagagtgtttaggggtttaaagagttcgtttaggtgttaatttagtactgtatttacatactaatatactcctactactatacatatactcagtatattatacatagtatatagtatggtgtatggttagtatattaatatttaaagtgttagatctaagggtttaatgtgtttggaggttatttctgggtttgaggttatttgatgaagacaactttggttcttaggccgtattcgtcaaacttttcagcggtttcgggtagatctcctgcgacattttcaaggtgtctgaataatattttaaataaagtttcgccattgttgccgaatatgataacactatctgataaattaataatagcctttgtgatgggctttttaattagttttttccggtcatacttaaccttgttacagggagttttgagccttacgtgaaaccgtaaaaactcgtatttcacttcatattcctccggtgcaagtctttttaagccgtgaaaaaagtgtaatttactcatttttatcctcgtcttagtaatgtcaacccagttattcaagatcctgtcccttaggaataggagataattattattttcctggagtatacagacatgtttgtcgggatactcattgttaatttttgtcacgcttaaaactgatacctcgtgggaatactccttagaatcttcagttacccaaatggtcttttctgaccctgatgctggatcttggtaaacgactcttttaacagggtaggagtttttaggcctgtaagtcctgcacttggattccacacgggtacactgattaaagtaatgctcctcggaactttcgtcccaatttatgttcacagtgagtttttcagcttcggaccagactccgtcattcctaaccatttttttaacatcgccgttgacaagttttaggtaaattatgttctcattagccttatcagtaaaattaacctcatgggcatattcgctagggtttatagtttgccacaccagttcgtccttaccagactctctcgttttgacaactttgttaaatataaaaccctgagttggagtatatccatgaccgataagggcagcgtgttttctattcttgttaacttcaatcttaactttcaagcccacaggcttcaaactttcaacctgggaaggatcacgaaaaacattctccgaacggtcattaaaatcctccaaaaagtcatttgaaccagtttcactcgattttaattctgccatcttaaattatttcaactgatctaacaattttagacattcatagattcaaacattatcagatctactatccacatatataccaatatactacatataatactaatagtatataattagtactatatctaatatctataccttaactatacccctagagggagctaaattaactatatacccctagagggagctaaatgactatacttatagtactatatagctatagtattgcctataatactataatactattactatacctacgatactataatactattactatacctacgatactataatactattactatacctacgatactatagtactatattatagctaatatctaaacccagacatttattattatattctaatatactatacccgttatactattcctattatactactatgtatataccatatagtatatagtgtatagtacagtagtactaagagtatataacatatagtacatagtataggtataatagtatacagcatatagtacatagtataaagtataaagggaatagtataatattatggataattatttcctggcttgaagttctcgttggtattgattccacgtggtgcgttgtaggaattcttgttctttgaggtgatggtagcttttcttaaggtctgagtcgaggtttagctcgtccttgtaccgggtccagtcaagctcggacttggaaaccgctgacaaagtcggagcaggacccaacttcgaatacagctcatccaaatacccaaactcgcctcccaactccttttccttcctctataacatttattagtggttaaagtatagataagtttccctttacatgtgaattgagtaatcagtaccttgaggtaatttgagtatttccgtgacttcttactgactttgtcaaccaccctaacacacaaattaacacaatcacaactgtataaatataattgtatgaatgaataagtgggtaatgtgagactcgtaggtggttccggcgaatttgtaggtagttttgatggtggcgggttcggcgtctttgactgctacggcatgtttgaccatttcaagtttctcagaatttggcgtctggtggcatttttccttaaattccctaatgtcaaaccggggtgacatctggaatacgcgactgatattcttgtccaaatagtcttgaaagctttgagcggttctaatcttgggcgtaggaggtgatttccgctgaaactggagcataaaatcgtccttttccccaagctcaggatgcctgtaagacacatcactggccctcaccatgtcatcaaacattaagttcacacgctctaacatcttctcacgccgtttcttctctttatttgaggtgagggaagattcctcgtcactggaaacctcagataacacatagtcagaatcctcagaatccgaaccaaactcagcctccaaaatcgtcgtcatacgcccgtaaaatttttcaaacaatttattttattcaaataattaataatatttattaaattttaagagataattgtgttattttgagagttgtatggttagtgattgttgatgtgagtaattaattttcaactgtgaatccttcatctttgaggcatttgttgtgtgcttcgatgaattttttacattgttcctggccgttttgggcgatgcagtcgtctctggcctgtttagtctccttgcaaacgcagcagatgtgtttcccggatttggaagtctgattctgttgatttttcaagtcgcaagaaccctttttgcaaaaaaaatcccttaccctgttaaaatatgataacattaccacaaatttaccacaaatttaccacaaatttaccacaaatgttatcacaaatttttatagtgtcaagattttagtttgcagaaaataagtaaaattctccagttaaattaatttatacttaaatttcagatgattatttttagcaatattagtttgtagtgtgaatcatgaaatgttaattaaattatcatattttattcttccaaacgttaattttaaaggaaatgaattaatttctcacactttctcattttttacacttttttacacatttctcaatttttacacattttcaaattcttacacatttttacacatttctcaatttttacacattttcaatttcttacacattttcaaactcttacacatttcgcatactaactacaattttccaaattctcataactaaaatgtgttataagaggtgatgaggtgtggattgagtaagtatgtgataaagttgactttggtgttggctgggttagtgttacttggcgccatttttaacctcgggaacatgaccgacctaacttacaacgccagacaatccattctctcactcacatcccactcaaccaatcttatcaatcaaaatactaatctaactgatcataattccaatcttaccgagcaaaattctaaccctaaagagagtaatttttaccctaccgagagtagttctaatcttacagagggtaattcagggttgattgataataatgttgaggatttggagaagttttataagggtttgatctccggagtggcagaatggaaaataccccgaaactactctctcacccaagccaacttaaccactactcaaggtaattatcaacctatcaactttttaacttattatcaacttgttaacttgttaacttattaacttattattgacttgttaacttatgattaacttgttaacttgttaaaattgttaataattgttagcttgttaaaattgtgtagaggagtatgatctgttggagatgcgtgagagggagttgatggaagtaaggctcaagggaaatgtcaagttcactcttaaattagtcaatcaaaccaccaaaattaacaccggtaccgtaccacaactaccaattgtactcttactcttttactcctagttactcctcttatacttctagttactacgcctagtcatacttcctactcttatactcttactattatactcctagttactactcttgttcctagttactcctcttagtcttatactcctagttactactattatactcctagttactactcttgttcctagttactactattatactcctagttattactcctagttaccactcttatactcttagttactactcttatactcttactattatactcctagttactgctcctataaatatggttggtaaaaaggttgtataaaaattgttagagatgataaagagtgtggaaatgagtgacgtgggcgtgtgggaagtgtctgagcaagtgaccgtcaacattgaagaaaggaaatacctctacatatcatcaattctctccatcgtattcttactactcttactatgtgttaagaggacgaaaatgatctttaccattcttggatttctcagcctgtttctcgggattacagccgctaagctatttttacccccaatacgtatgttaacaatttttactgtagatcctaccacatttacactttgaaacttctatttacttaaactgtatttaacttaattttatagttaataaattttcagtgactgggaggttgttggagttgtatgtgagatgtgtgggatatttgaaacccctagcctcagtgtgtatattaatagttttgatctcgtattacttccaccaagcgtcggaactcgggaaatacaacgaaatgcacctgatgttttcacaccagtttaggaacctagtggtcactgttatctccgttgtgctgtcaatttttaatcataagattgcggtgaacgtggttaattggttcatctgggtacccatcctgcaatgctacgtattccaaaattatcaacaaatcattaatcgaaaatgtatacacattgttactcattctctaagttatttctaagttattctacaagttaattatttctaagttagttatttctaagttagttggttattagttatttggccctcctgggttgttttacctactccgtaacgctgttttagctaaagaaactaaagagactgagcaaattgaggtaaaaactatgataataatgttgagcagttggtgggcgagtttgatgtgttgaagatagaggagacggaatcgttacaggagtactccgactttcaccagagaagaagaaagaacttcagaccataccttatgctattatatttgatcttgtttctgacatcacttgtgctctgttttaagaataccaattacttcaacagtaccaaggaaattgacgaagccatgtcagattccttctacgtcaatatggaaacactaaatatacaagattttaacctggatcaagataacatcaacttcacaattaccaaatctgtacctcagtcaacttagttatgtaattctgtgtacatctgaaccctaatcttctgtagttagagagagtgttgttggatgacataagtgagataacgacggttgagttgttgaatggttggattgagtcgtttctgaagaggataaccttcaaaaattcgttaatcgtgtttaaggatttggacaaccctaccgagtacaaattactaaaccaagacaataccaaagatttaaccaagattaatcttagtttattgttcatttttcaagccaataatcaaattaccactgcagaggtttgcgttacggtgtcaggtccaacggcgccaatttcttagctctccttgggagtccttatttctccctacttactcagttatttccctatttagtccctggagtacttatttcctaagttatttagccttaattttattaatttagcccctccggggccatgctatagttagttaaataccccgacctgacaaactctgtaaaatattattagataaagatcggctcgtctaaggtgagtacgacgttgaagaacttggggataataacgtttggccttgtgcagaataaatatttgggaattcttatcttcttcaactgcttagtgctactggccgctctggcattcactggtggtaaagacaaatccaaattcaaagccgcgattattattttattatttattattagtctttgcttcagtattgctttcttctttctcattcctaaacttttatacaacattgatacgaattttattaaaggtaccgttacggtgtcaggtcctacgggaccaatttcccagttatttactacttatttgtctcccaggactacttagtttccctgcgggaccagtttctcagttatttactacttgtctatttcctggaaactttttaacccctaggaatctctaaactatttactcatttccatagtatacaactattaacatgtgatagacccgtcggtttcgatgttgagcgaatttctatcccccttgttgaagttaatattccttagaaaagccgttactgtcatcgttttcatctgtttagtactgtctgtcgtttatttaattattagtttacccaaggaatactcaacgtttaacgagaacatgaccagtgttaagaggtcaattaactcagactggaagaatcttaggattctactctatcagtttttgctacttttacttatttcggccgttataggtgcgttacggtgtccctgcgggggctctactttttcatatttatactgtacatatcccctatgagctcactagttataccctttggtcttttatttgtatttactaattgtataattaggccacgaatcgtttgggtataagtatgacgagttccgtaatgaattactgagtttacgttacaatttcataatgatgtttaacaagttcttgatagagcctaggcctgacattaggagtttactttactggtaccacagggttgggattttcgtcttttacaacgttgtgctcacgggatttctggccacattttacttttactcttgtagtaaaagaggacatttattcagtaggaacaagaactttttcgtatttcccaagccaagcgacttcaacttcgacgttaaaattaaagccacctttgaagaaattttggcctttaaagttttttcccattgattatagttggttaatacttgtttaggtctttttagaatcgttcaattcctacaaagaacacctcaaatccaccgaaaacaatgtaattttctacttagtcctgggattgtcatagtgttgtaggatgttagtgagaggtttgtggagacatttagtcagaagatgcatgggttgaataagttaacgtttaacggggatttgtatgtgtatttcgagcgtgttaagcggtatctcctgtgcataatattcctgcgcattaagatcaattccttcaccgagaagattaaagcgctggaactacaaaaggacaagatcaaaaatagaaatgacaacaaacgaacttatttgataatgctaaaaaagaaactcttcgacactaccgaagaggttgaaaagttcaaagcaaagtataaaattctacaactcatacaggcaaaccagcctgttaactcagattctgtaatatctgatcctgtagtaccaaaatcagtagtacaggagactgaggagattaagaaatatgacacaaaagaactaaaggagttcttactaatcccagaactaaacaattgtaacactgtagagagtgtggagagtgtagagagtagtgatagtgtcagtagtgttgatgatgacactggagttgatagtattgagagtataaaaaatgaagtaaaaacaacaaatgaagtaataaatgaaagagaatgcagtgaaaacactttaaatacagttgagagtgacacagttgaagcggcgaatgtagttgaggatagtactcctgacaaaagtaatacaccagatgtgattgagaatgttaaaaagatgaatagtgaagtgttggaaagggttgaaactgaagagaaagtggaaattggaattttcaagacgaaaattctcaaatcaaaaaattaattaatttttaatattttatcatttgtatgtaaatttttagtaaattaattgtattagtgaggataaatgaggacttctcttttaactccttctaggccgtttttacccgtaaaacggccaaaattcggagtcaccctcctgttcacatttccatagttaacattttgttgtgaattgtgattgagattgaatgggtcccagttgtttaagttatctttatctacagagtcccaccttgctaatcctttcggcctcaaaaattgattatttatatacaacgggaaatttttaacaggtttaatcattccattctgttgttcaaggtgataattaatttggttagggtatgagcagtgataagttggtccgagtctggactgtactaatctataatctggaggaaaattacatccgtatggaccgaaaactggcacgaaaactccacgaggctgtggagtaacatgatctgaattctcaatagaaattgatttattcctgaatcctccagtatcgccagtcatgtacgctttaaaatccaagttcttcataccatttttatatatcgattttaaccccttggtaactgagttgtgcacatctacactgttattgactggaattaagatattcgtttcccaaacaccgggtgaagtttcttgtaattccgtaacaagagtgtgagaatctgtggaatctcttgtattcatcattttaaacacatttttcaagctgtataaggaatttactgagccattttcctccttcccgggtgaagtttttccaccaaaaaactccaaattattcctacaatcttcaaagttcatcttcaacaacattaacaaagtttgcaaagtttacaatgtttacaatgtttaaaaggtttaaaaggtttaattagttaataatttgaatggttggaattgagaagataaatgtaaaagtctaaattttaattaattttaatggaatctccggggataatttcctgggatattttgtaaaaatcgctggaatcatggtgcacaatccaaaatcacatcttactccaaaattccacaaattctctctatattaccaaattacctacaaatcaactaataatactaataatagtatgaatattataaatgctataaatacaatgaatagtgtgtgagagtgtgaatggagattatgaccagatgtgtttgtcgtttaatttttcgagtatgtacagggctttgacatttccgtcacagtgttttctcgcctgctcataccctttcgtcgccgccatcttcaacacatccctcaatccagggtcctatcaacatataatactccatgtatattgttaacggattataaacactaaatcttaactactatatcctaagtaatatatcctaagtactatatcctaagtactatgtcctgggtactatattttgggtaataaatcttaagtactatattttgggtaatatattttgggtaatatattttgggtaatatattttgggtaataaatcttaagtactatattttgggtaataaatagtgaaagtaatacttgtatggctttattgagtatattttgtagtttgaggtctccggttcctcttgctttttgttgtaataatatcagtgagggatcggtttctatgtgtccagtgtcagactctgtggattctgtagattccaattctgtggattccaattctgtggattccgattcctttgtgtatcctgagctctgttcacctttaaaccgtagtgacttattgtgatccttgttgaactgtagtttggagaatttcttggggttgatgccgaacattgatgcgatgtctttgaaaatggagaatccgttaaagttcatgccgtcaaacatgtcatttcccatgccaaaatcgccaaacagtgaattctcaaactcccgctcaaatccggacatgtcaactgatatcccgtcatcagaattctccgggaactcagaattttctgtgaactcagagttctctgtgaactcagaattctcttgggattgttggaatagctgagagaaatctgagaagttttgggataggtctgagaaattggtgtgaatgttgaataaagattcaagagggtttcgtcttaagaattttttacctcttttgttaagtttgggcgaggattctcgcgggaatactctggagtatgacaaacggttaatcaaatcctcgtcagtcttacaatcctcaaagtcaacactcgacattatcaactcattcctcatctcatccaacaaacttttctacagattttattattttagacttattttagtagtatttaacactattttagggttattttagtactattttaggtcataattaagctaattttaagtcataattaagcatattttaaaggtatttctagactagtattttaggactaatttttgactagtattttaggactaatttttgactagtattttaggactaatttttgactagtattttaggactaatttttgactagtattttaggactaatttttgactagtattttaggactaatttttgactagtattttaggactaatttttgactagtattttaggactaatttttgactagtattttaggactaatttttgactagtattttaggactaatttttgactagtattttaggactaatttttgactagtattttaggactaatttttgactagtattttaggactaatttttgactagtattttaggactaatttttgactagtattttaggactaatttttgactagtattttaggactaatttttgactagtattttaggactaatttttgactagtattttaggactaattttaagtaataattaagctaatttatgttaattgatggtgtaaactgagtaaactgtgttgttactttgaggtaattgtcatttttaactttgttgtaaatgttaaagatggagtcagcttcagatttatacgcctcaaccgttctaactccaggattcatgggcctacacacctttataccaactactcaagtaatgtacacagtaatagtatctagggtactgtatacctaaaccttaactacctagaatacttaactatataccccgagagggagctacttaactatatactgtatacctataatacatagtactatagatatctacttaagtataacttgactatgcccagataactaaaatccccgggattagcataactaagtatatcctgaagattaagtaatcagtaactaaagtactgctaaggatataactgagtatgactgagtaatactgaggaagtttgtggagtaatttatgtttggattgtgtccttgctgtgagatcaataatatcaacgtctgctgaatttttgggtactttaacatcatatttctggagcctttccaccagagaattaataaattcccttctctcctttttcgtcagtggctcatattccaacttaagtgaagttaataaattattatattccgactgaaattcgggattttcctcttctaatttccgttccaaagcttctttacccaagagagataactctgcaactctacggattacgtcgtccggcttattacagccgtcaagcgtaattcccgagtctgtcagacgtttttgcaagtctgagaaggaccatttcttgtcctttaaacctgtgtacaaatccgccacctcagtctcgagatttttctcagtgttaaataaccgaacggaccttggagtcaaattcaaacgtgacaaattattaatgaataaataatttccctgcgatacatttctaatccaatttctaatccaacttctaatcaaattattaatcaaattattaatcaaattattaatcaaattgttaatcaaattgttaattaaattgttagttaaattgttagttaaattattagttaaattatttatttaggggtgaattggtgaaattaggtgtaaaaatgtgtagaggtgggaatggtattacttgttgtggaagttgtgagattccggtgtgagttgtgaaaaatattgtacattacgattaaaaacaagtgtagaagatgaaatttgtagtaatattaaaagtatagtaaaaactttgaaagagagcattgtctaaaatttaaggggatccataataaatatttatggcttacatatgaaattaaaattaataaatattactaaaatccataataaaaattataaataccctagatatcaatttcccaataccacatcacacataccatatattgtatattatattattcagtatataatattgtgtatagtgttagaatattagagtttgtatattatagcatggctgtggaaacggaggagtttatcatatcgaaaagacagaaattaggtatagtttcatgctgtttcgttacgaatttacgtatctccaacgctaaaacaatagtataatatctcagtaaaatatgaaataatgtatttttacctagataacctccgagaatggaggaggtaacggggaattccaacccgtgcatttttatcatttccctaatgaaacaatttaattgaagtggaaactttagaatttgtgtgtctgcgttgtattgtgtcgaaatttgttctaatttttcgtcttggtccaaatttccctccttgacaagggaaattaacgccattaaagccctcaattccggctcacaattcttcgggaattgaggctaacaatgttaattaaggtgaattatacttaaataaagggttaaatatgttaaataaagggttaaatatgttaaataaagggttaaaatacgttaaataaagggttaaatggtgtaaataggttagatagttaattactttggagagaacggaggataagttgcgatattgtatagttaattttccagactttttattcattagttccagtctaaataatatgtgttaactattgtgttacacagtgtgttggtgtaaatctgtgaaaaagtaaccgtaggttccacaggagagagtggcaaaaaatgctatcccaagctctctacagagctcatctattagctcctacaactcattaatattactaattaataactactaactctactgtactccttaactatataaatgcctatgattcttaactatataaatgcctatgattcttaactatataaatgcctgtgattattaactatataactaataaataattgtataactaatacataattgtgttaggttacaagttggtgtaggggataattggatgtggaaatgacgagtacgtggaaggatttaatgagttctgggtctgtgaattgatattgtccattaacttctgttaatagttccaaattccttccctcaattcgcttctcattaaacgctattctcgacattctctcacacaggcgttccgaatgctataatttactcatgaatatttttactcaggaatatttagttagtaatatttagttagtaaataaataggggaatgagtaggaaaataagtaggggaatgatgtgatacgggaaatccgacatcgtcagatttgagaaagaaggataattttacatcatcttctgttaccagatgattgttcacaagcgttatgttcatgcctaaacatattaatagtattgaaaagtcaatagtatgtaagagttgtaccggagagtagtaggtttttcatggattcttcgagaattccgttttttccaatgaataaaatccgagaattcattattctaaacaatttacacaattgtataactaataaattgttatcagtagagtacattttctgggcttgaattccccaaaggcgtatttgtctgtcataaacttgttcgtcagctccggttaaaaatgtatcgttttgagtatttaagtcaccaatttcaccaggctcagtgatgtcaataacttccaataagtcgtcggaactcgacattttcaaattaaaaattaaaaaataatattttattaatgaaataattataaggtaattggacaaaaaaatgtgtaatcacatgtcccactgtaaagttagtaattctatagtatgcctaagatcttaagtatttaactgaagaatcttgtaaaatacgttaaaataattaataaacgggaacaaagtgtgtaggatctaaaaattggaaattactcaggtaaattttcaggaataaattgtcagtaaaataactctataatttacattaataatgaaattttggattaaattaagtttggaatcaagttaaataaataatatcccacaacatcatggggcgtattaatactttatttcatttactcgattattttaactactttcatcctttttccacattaaaggtatcttttcatcctctactcatacaaatattattattaattattattaattattacaattaattaattgatattattgaattaagagtttgatgaaataatttttaggtagttgaaaatgtctcacggcgccagcagatataaaaaggcgcacgccaaaatgcgctggaaagtaccctcaactctatttaccctaaatatatacccagttatatacccttaattatatactataaattatatatatgaggtgaataatatgttatagtggaagaagaagaggacgaggcgtttgcagaggaagaggcggaagatgaggcagaggtcaagataaatatttattcgcctcggctatctctttagttatttccctctttgtctcttctaacatccaatacattaattctattactctttccaatacacaattactattacattcctctgtatctgtaaattcatttcttatggtattaatgtgtgtgttaaatttgttggtgaattcttgggagggttcgggttcccttgtgttctcaagttcaagcagcagtttcccgattttacaacaggtttcacgtatagacttgaattctccgagtaaattctttggtttattagaggttaaaaagggatgtgcgcgaatttggtcaaatcctaacctgtcctcggggtccctcagtagtgatagtattaagtctttagcgtctggattaatggagggaggaaacgacagatcaaatttcctaactctatcgatgatgaaatattctgtggacccgtagaacggaggcctgcccacgagaacttgatacataagacaacccagactccagaaatctcttttaaaaccactgtcagcgttacttatcgcctcaggatccataaaattcggggttcccacataatactcaaacgttcttctcaatgatttatcctgtttactatgtttactatgtgtcagtgtatcctgtagtgtatcctgtggtgtactgtgtgtaatagagtcgtttgtgttacggtgtttggaggtggcaaaatcgatgattttgagtgtgttttgggcgataacgatgttttcgcacttgaggtccctgtgaataatgcctttggagtggacgtactcaagcccgtcaagcacctggtgaataatccaactcgcaaactcgtcactaatcgagccagaatacttaactaaatcccataactctccttccctaacatattttatacttttctattgtactaattatagtattcttaggtatatagttaggtatttagggtatatattaattagctccctctaggggtatagtaaagtagctccctctaggggtatatattaattagctccctctaggggtatagtaaagtagctccctctaggggtatacagtaataattatatatagtatagatattaaatatagtatagagataacagtgtaataattacgtggcgggttcgtagatgagatagacgttggagttatctttgaaagtgtcgatgagtttaataacattcttatgccccggagagtttaaacataatagagaagcacgctcctgcttcacaaagttctcgtgattcttactattcaccaatgactacacatattgttacatagctattttaccatatttaaccataattaaccataattaaccataattaaccataattaaccataattaaccataattaagaataattaaccataattaagaataattaagaataattaagaataattaagaataattaagaataattaagaataattaagggtgtgtaaatggtaaattaggagtaaactagggagagtgatacgatattgtagattttgagtgcgtatgagatgaaggggttggatttgagggtgacgtgccagacattggaaaagttaccagaaccaatattcctctcgaaatcaaaatcatcacacctatactacaacattattaatagtattaagtagtagtgagtaagtagtgagtaggttggtggatactttccgtgtgccgagagagtggtctgattccttaggtttttcacttaaaagtgagattttaggattatcagtaatcaagaatcccgacttcattcaagtctcaaaaaatattttacaaaaaacataatcgattaaaattcatctaaaataataatataaattttaaaattattaaaattaggaaattagaaaattaggaaattagaaaattagaaaattagaaattttaattaaaattaaaaatattgttgaaaatgtgttgaaggttggaatcaagctttgtaatgcactttaactaaaaaatcattagaaaaacattacaaatgaattgaataattaattttgtgtataggatactttggggtagttgagattccgtcccgtcaatgtgtatattaattccctttttctcatttttattcaccaaatgctccaaatcctaacaacacattaattatataacaacacattaattatataacaattaataaattgtataataattaataaattgtataatgttattaattgtgtaatgtgtacttcggcttgttcttcgattgaggattcgccgtagacttcatttctgacatcgcctctgttattacaaagtatttgcttagttatctgcatccaccaagagtttctcgaatactcgttaaacgaactagaaataattatcatttattttgagtaccagaggattatttggtccttgtttgagtgtattttaaaacactcatttgagtttggcaagattaatatcggcggtgatacactcatcaagtcaatcttcatatactcctcatttcccctaattatacacatataccaatgcagcacagtattgtattataccaccacagtatagtattgtaatctaagtatagtaatacagtagttaagagtagttaatggtacagtttatggtatagttagtaaggggtttcgaacctggtacctccaggtcctgggattagtagtaatacactgtactatcatagctaagttggtaggtgtaaagttaatttgatatgttatagtactatgggtatggtgtgtacttgagaagtttgagagtatctttattcaaaacagctgtaacaagtgatcgattatccaaattctaaaaaaaataataataattttttttacttggtggtcattaatgagtgaaaggattccctgagaaattccgttacaaatatcttccttcttcacagcaactttagtgcccgaaataaacccaaaaataaaaataattttaataaaattggtaaattattaattaacattttgcccagaaaatgtgaaatcaaaactaatgtgtaaatttttcatcgccatgacaataaaggcaatacggtaacaatacccagcacatttatacgccgttgtaagaataattttaataaatatttttcaaacaaatttatctaataaatgtaaaattaactaaatttattattaattgtagtgccgataatgtaaaatccacggttgaaaataatattagaatttaaaagagcgataggatgcagaagatgaagacaaagagtaaaactccgaaaaaggccgtggaagaagccgcttccgcaggtgtaagtgacgagtaacttggaaccacaaaatcactaaacaatgttaaataatttaagtaaattattacgatagacgtgtcattttatcctttaatgatgaaaaaaacacagaaaaaacattcccagtgctcctacagaatgttaacagtgcataaactataggtaatactataggaaatagtaaatagtatagtaaatagtatagaaaatagtatagaaaatagtatagaaaatagtataggtaatacctttgattgtagtctgagatggagtatacagatcctgttaaactaaaaggggaataagttaatgtaagatacttatcgttgggatctagagcggtgtaaacatcgtcttgaaggacatgtgttccaactttctaaaataatattttagggtttaaattaccatgagattacgttcttcgtagttctctttctgctgtagtttatattcatgtaacgggtcctgagtctctgacattttaataaaatttttaaactaataatttttatattaattagtaattaacaaatctatttgttaaagatataaaaataaattatgtccgaaaaataatatccaaaattatataattatagtatgcctaaaatttttctctattacagaataatagaatgctcagttatgagtaatataatggaatgttatgttatggggaattaaggaacaaatgtgccaaaattcactaaaataattcaacatttgttaaattaaataattttaataaattttaaatttttaatactgcgagaatcaatgataatttatcataaaatatcaattttgggtgatcacattattgaatttctatacataatttatacccttgaaattgttcttttcgcttcctaaactacttaattattctatttatcagtagaaatattaatatatttcatgattccaccagtttaccaatgacatatttaaataatttttaataattttttattggatgttttttcaaaaaaatatattatttttaacatttttttaaaatatttaatttattttcaatttttacaaattgtattatagtaatttataaaccaattttctatcattatttccgtcagtctgcgtaatgaaatggaatctccaactggtagatattgaatataattttaatgtgttgaattcaattttaagtgtagataaataatgctaatgaatgaattttctattgttgggtcattgtaacacaatgtgtacaagaatattcacgattaaattataaaaatatttttttcattaaaaatattatctttctctaaatgtgtaacattaatcttatgtttttcagtctacagattcccctgagttagaacaatttgctgagatgtttaactcggaatcgcaattggatgaattattacataatgcaaataaccaatttcaaattaaaaataatttcatcaagggaaatgacctaagagtatttttcaacattcccgaacaagaacactacaacaatttcaacgcccatttaaaccattttaaacataatttctacaacgataactccttcataggtatcactactccctaccatactcctatctattctcctagactataaatatttactcaaattcttaccgataatacataccagggaactttccacacccttaactacttatctactgtattaactatcctaactatagtattactacttaactatagtattactacttatctaatgtataactacttaactactgtattactattgtaatagtgggctatagtattaatagtaagttatgttgatgattgtgtaggtagagaggattattataatttaaagcatgaggaatatccagacagtacagaacccggcgaagaacctgccatagaaccatataacacacaacatagtcaatataacacgcaacatagtcaatataacacgcaacatagtcaaagtagtcaaaatgacacgcaaaatagtcagaatgatccatacgctggaaataaagctgtgtgtggacctggtgaactaattaaaaaggaatttgtaaaacgtgattcaatcaatgatgaaaattacataaaggatgacatttatagaaatgaaccatacagaaatgagtcatatataaatgatgaaatttatggaaatgagtcatatataaatgatgacatttatagaaatgatgagttgtatggaagggaagaattgtatggaagggaagagttgtatggaggtgatgaagtgtgtagaaaggaggagtttgcaagttcatgtcaggatttggtggaaaaggatcagatgtttggtaaatatgactacaacgacttcatgacaccagtagccaaatgtgtcgaaaatgacacgtaacccattatcataaattacgcagtacataatatactcagttatacaccggataacagattaatatgattagatcactgcctattgcgaatattggaagactaatgaaaagcgtacttccgcaatctgccaaaatcgccaaacaagccaaggacatgatccgagattgcgtcaccgaattcatcttcttcatctcctccgaagtaaattacatagttactctccaattaacaatagttaacggtatacactctaccatagtaatctcacaatacctaacaatatttcacaatagttaatattttacagtactatagtaatattacagtagttaatatatacagtggtatagtattacagtagtatactaatatatacagtactatattagtataatagtggtaggtattgagaatatgtgataggcttcggatttgtgtaatactgagcgtcgtaagacgttgaatgcggatgatatatttgtggcgatgaacaagttggggtttgagcattacaataagccgctgaggagttaccataacaagtggaaagaaatcagggacctcaacatacctcagagtaacccaagatcacagtaatttcagttcatacattttacacactacctaactcaacaccccgaagaatacaattacatctaaccacaatgtgtaataatgataacaaatggaaaggaggaatatagtaagtggaatcatgaggaatattaaaatattttaaaacacattaaatatttaggaaataatttaattttttagttggaaattttaaagagaattttaaaaaatttcacttatctattcaccaaaacttgctacgatgagtgtgccaaggatatgattcaacgtattaacccctcacagctaattatgcaaaattatcaacaactgataaatgctttaggggattttataggcccttttttcataactttggccttttcactgtaattaatggacaaattaatttttattagggcagtgtataacccctggaaagatagagaaggaggctcagttatttactcctttgccttattcttcttaattctctggatcggacccgttatttgcggaattaacgccacattcatgggatccaaccagtaacctaattacacaattatttatctattaattagttaccggtgagtaaccaatttttagggattgtttatgtgtaatttcggcgatgatgtattttttatttccagtgtgtttggctacggttgtggccttgtggttccctattctctacaggatgttaattattctaccttccttcggatattctaatttaagtactccttacgaaataattattgttatagttttatatcgatttttaaaggctcaaagtcaggagaataggcagattcttgtatttcaaccggttttacttttttactcaatttacaccattctcgccatattaaattgaatttttaatggaaatgtatttattttaaaattttaatttttttaatgtgctacagtgtaaatatattttatccggaaatataatttgtgtaaattttttcaccttttgtattaataattcttaaataaaattttatgtatgatttatttagagaataaaatgattctacacatgtgtaaatttttattaatatttttgtacatcagtttgctgagattttgtgtattggtaaatggcaactttgtccctgatagcttcatgggtttatctacggtaataggccctgatacctatggaatactgaaccagtataaaaatctatacactgaagggttatcgcaatttgtctcagacaaagttaatttgagcaagtataaaaggttttacaccgaatttgaacctgttgcggctaatatttttacaaagtataaacaggtcacagcgattttcatgagcacttcgagattctattacaactaccgtcactcgggaaatgtatttgcagtgttgtcaaaatatgttaaattcgggcaactctcaaataaatacatgtcacccatcctaccagaaacttgcgcctgtcatccaactaacactgcggcgggtaatggattatggagtttataattctgtaggcagaatctacgttgattctaacgttaatcttaagtattacaagggtgtaatatctaaagacgaatcgaacatttattatgaagacttgataattaaatacaacggtcacggactcctaaagaaacatttcagatatgccatgaccggcagatatcccaaacaattcccaaactccttaaaagtctacacacaatacaccggtacacaccactcaaacatctacaccaattactatagtactcccaattatgtactatacctattatatacctattctattatatacctattgtatattgtataatgagatgtgtatagtgggagatgaggtgggaagtaataagtttgtgtatatgacgggtcatggaggagattcgtatctccaatttcaggctaaagactttatttcatcagttgagatggcgacgaattttaaggaaatgtacctaaaagagccgaggatgaagatattcacactactggacacctgccaagcgtctacaatgtatacccatgtggacaaggagattccactggtgtggatcgcctcaagtgtcaggggtgagagtagctacagtcataacccaaacccgtacatctcaatctcgacatgtgacaaattcacatttgtgctgagtaactttttgaacagtgtgttatcggggattgtccatggaactaataaggcctcggtgtccagactctcactcagacaactgctgagaaattatgaacggaacactgagaaggaaaggatcgaatacggcgtcagtgagaacataattgacggagattcgggggaaaagttggataaagtttatttagggcagtttatattcaattatcgtaaattatacgccaactcgctcaagttcaaggttaataaaaataaaggtaaaaattccaagaggtttagaaactttaaagttgaaagtgccaagcaccaaagatacgaaaattcaacactcctagacaaggttatccatttcctcaataatcctggaattatttatcactcaacgccaagagaatcatgagataaaataataaaaatttggattaaataattcactcaaactgtacaaataatttaaaggcaaatatttgaaaaattaacctgatggaataaatttaataatttaatggcatgtacatgtgtatataattacttccggaaggttccaagaaggggtggaatttccaccaaatttacattaaaaataattaataaaatttaaatttaataattttaatgttggagaataaatttttgtaaggaatcgcatttgatgtgtgaggttaatgtctgaatcaatcaagtaagtgcacattaatattctgacggaaattaacaaaattttccttatcatatgatgcagagtatttgttaaatttatatgtgctaaaaattgcatataaatggagcacgaagaaaactgtccgtggctcaagagtgaacaaaacagctccctgattcataccttgcctaaaagctgtcaaaatagaaaatgcgctatttggaatgatttaaaggagtggtttgggtatttaggcaaaagcctctcacttttagccattcaagagatttacagagacgtagcccatgaaggctcagggtatccctctcaataattaatttttcacttaattatattaattaaattagtatttcgagttaatcttcatccatgtaactcaaatgtgtgaataaaataacatatttttttagggtatatgagagaatggcaattgagggcggaaatatcctgagagaagtagtggagcttcaggctatgagtggtactaaggaagatttataccttaaaggagtgtcaaaactcgtgtttggaaaggctaccgaatcttatgtaaaatttgtaaaacaacttcaactgcaaaaaatgtctgacctcgtgaatgacactatggcattgtgtaatttcgcgaggttatacttggcaggagctcagacattaacttcgccaagatcagtggcaaattatctaagagtttgtgtagcattttcagtaaatgaaattgctggaccatcaaaccactcacctaccgcagaatggatcgtaccactcattcaacacatttatcactccaaaaggtaaaatataatagaatttgtgagattaattaatttcgggtgtaggttcagacatttgcaatacagctgtgataatctactccttacaaatttacacatgtacatgggctacacatgtgagtttcctactatttacttaaaattcattagttaaagaactgttgccgagaattaaggaatgttttgataatttacaaaacacgccgcaggtaaaattaatactgtaaaatattactagggaactgaaactcacggattcgtcctcctaaacgcttttgctcaggattactttttaaaactctataaagtaaggtgatggcgtgataatgtgtttagatgtactatactgacgagactaaggctgatgagtttgctaaaactgaggctaacaattttctgaatagtagggctattgagcttttttcctgcgttcacatgaagctccatttaacatttttgaacgaaaatctaaacgtcttgttccaaagatcactcagggatacaagaacaattttcatgtaactttaatcattataattatttgtagtaatctcctcggagcttgctggtccatatcgcaaaaggagtccagaaaactatggctttctaacctctttcaaaccctaagacaggtaaaaattgtgttctaacaggattttagatacaactgagtacaatggcatacttttctggtacaacgttgacagcggctgatttggagttaattgagttcacaggctcaaatttagccagagataagtttgaactactcctaaacccaaagaacttgaaactcaaagattccagaggcgcaatgtcacaagatttcgatcacgatacgcctccctacaaacccttttcatcacaagttaaagatgaaaatggtaaagaatttaggcgtaaggaggaatttggtaaggattcgatgggtggagaattgatgagtaaggaggcgttggttaagttgggaggtagtttacttgaggcgtatggatatgttcaagaattcgtagtagataacgcctacaaactgattcaaaacagctgttttacacccgtaaacaccaactcccagggagaacaaaaaggttagtaacacctcagttatttcactccctaaaaattattaacttactgttcaggtggtttgaggacggaaaattctctacaacctagtgctctacccgcaaatgtgttaccaggaaatatgttatcaggaaatgtgttacccggaaatatgttatcaggaaatgtgttacctgcaaatgtgctcccgttaaatgtgagatatgaggaggcgtcagatatggcgcatataaagattccgctggggaaaatagcatctgctaacaagttagaatatcgtaccttattgaagaataaggataggaagctgatggaactgtcaattaataactttgacagagagttcccctccttttgtgtcaaggttccaaccaaaaaataatatacttgattctacaccatagaataaaattattttatataattttctattcacacaataaattgatgtataataggtaataatatttgtaataaatgagttttaatgtaaaaaatgtaattgcaattcacagttgcaagggaggagtaggaaagtccacagttgcagtatctttagctctaacactggcttcaaagggaatctcggtaggaatttgtgatttggacatttgtggaccaagtttagccgaattattctctctcaatagagattccgttaaatggaatcaaatacaatcaaattgtcacagttctgccggaaataataataatacgagggttgatttaaaatattccaatgaaacatgtgatttaaaaaaagaaaataaaaattctatgttattggagcctaaagaggtagaggggattaaaatcatgtcatctgagtttttactacccaaaaattacaccgtatctccataataaaataattattttagggatactctgcgtacagaggacccattatggaccagatttgctatgaaatggtatataaaactaactgggacggagtagaatatttaatactggaccttcctcctggcacaagcgatgttataatctcactagtggagaatatacacatctccggctcaattctcatcacaactcctaacatcctaaggtatccaacaatattattattattgtttagtacgaatgatttgataaagggtattaagttatttaaggatatggagataccaatcctctcaatagtagaaaatatgtcatattatatttgtgagtgttgttgtaccaggaggaatatatttggaaattctaaagttgagtccatttgtaaagaatttcaagttgaacactttgttaaattgcccttaatgagctgggatcaagatgaaacaacttataaattaagctctggttccgtggcatcgctgtttaatttggctcttatttccaactaccataactctaaaacagttcaggaatcttttaataatcttgtagaatatttaagtttaaagtgtaaatatcaaccgcagatgaagaagttagtcaattttacacaatttaatttaggattgaggctacatgttgttataaagctgaagaatctatcgctgaaaatgggattgactggtgagataattcccgtatctccataattctgttaatctgcaaattgatcaaattaatcgatttgtagttaattttaatattttaagaaatcacactgttgtgtttaaatgtagaatcttttcaaggattatgagtgagtgaagtattcagtgtttgctaattatacagcgttaaatagttaatgtgtaatctatattccatatatataacgtcagaatttggaattaacagtagtggagaagtaatagggatgtaagcacggaagttgcataaatatggtctaagaacttagataaaatagttaaagtataaagaaggaagaaaagtgcgctggaaattagttaattttcagatcaacgaccccatagatcagttatgcaggacaactgataatataataaaaacattgttccattctactgttagttaatatttaatttttgttacttttgtttttggtaattttattgaataaattattataaaacttaattctaagttggtgcatagagaaaatggaagttaaaaagcgtacactttacatattaggtgctgttggattattattatccataacatcaattttagtcgtcagcttaagacctaagctcgagcttgtaaagcctgataaaacgaacaaatcagaaacaaatgagtcaacaacttaaagctctttcaactttagtaaaatattaaatttggttctaaatagcaaaataataattgtatcacgagaatcagatttatttatgggataattagcagaatatcactgttatatgttgagctcaaatccgtaacaaaattcactaaattatctttaaccaaatttaatactttataaatcttcatgaataattaatattttataccttatctgtggctgatgtaaatatttaattagttaattgtgatgttatgattatagtgttaaaaatctgaaatgtgtagagaatataacgtaaaatcctaaaatcctttatgattaaaacttaattaaacaattttcaataaaaaaatgaatcagataatatctgatctatattgcacatatgaataatatgagtataaaataatcaataattaagatgtgctacgcggaaatctaggctaaaattgaataaataagatcccataacaaaaataaaataattaatgtgagtggaaggagaatagatgagagaatcatgtcgtttcaattattcattaccccatcgtggaagatcatggagtatcaggtttttgccagagggatcttattattcttgcaagattaatataataacatatgttaagtatagattttttgtgacttttatttacttacctgtttgtataaaattataaggttataaaatttaaccaaataaccgatttaattgtaatatttaaagttttgtacagtatatgagggtcaaaaaagttttattatatacacttccggttgtcggtattttactggctggatctttgattatatttaatttcgttaggaaaagaccggaaaaagaagaggaactcaaacctccttctgcattagaagatgaacttaaaaaacgtgaagaagaaagccgaaaacgcatggaagaaatgcaaaaggaaattctcgaaaaaaagttaagagaaggtaaaaaagccttggaagaacttgaaaaacgtgaaaaagaagtggtagatgagtttgcaaaacacctcaaaaaacctgaagaaagacttcctaaaattattcttacattggattccggttttccaacagttgatcctattacatatacttcaggagtttatatggtagcagttagtaaaacaacttttacctcagattcagatcttgttgattttactcacacactgctgggcataaagtttctagttactggtgtacaatttggtgggaaaacatacacaattaaaccgattgaagctactatggccacttcaattgcatttgccgctgatcctggattctgttattttctattaataccaggccctgactcgaaaccaatattcttcaaaaacgacggagataaatttttacgttgcgtagggtatccaaaggttaaagaagaaatgctagaaatggctacaaaattcaatagactaccaaagggcgtggaaatacctgcacctccaggagtaaaaccagaggctcccacacctacaccaacgacaataactccttctgtacctcctactataccaacgccaataactccttcggcacctcctactacaccacctacgggactaaattttaacttgacagttcagaacaaattcatgataggttcgcaagaagttaagttaaatataactcacgaatacgagggtgtatacgaagctcataaatatttcattgaaaggggcagctttacccctacctcattctcaatcggtgatcttccacaaacaggtcttccagtaaatcaaacagtggatacaattgtggtatatttccatcgagtaacgatgggtgaacccgttggtatacctctaattgtgttaatcttttataaaaaccaatctagaaaatatttaaataagggaaatggaaactgggaagaatctaaagctctattatttcgtgaggaacttgattacttagattccatttttaatgattttgtgacagtaaacctttctagacgttctgattattatcgtaatggaactggcacatcagaaattgagcaaacgttagatatgaatgtttacgttgaacctgatacaccctgtgctggatggacaacgtatatacataaattagaagaaggaggtgaaggaggaattgaaaaaccttttcaaattagacaattatggtttagtaaacagaaatttgatatattcccaatgggaaaagtttcaatcgttaatgtttatgggaaaaacgatgaaccgctatcttacgctccctcaattttcagtgtaatacgcgaagatggaattcaaatattttatgttcgtgcttactcacagtacttgcttgattcaagtgttaatccccaaaatttacctcaaaaattaaacaccctttagattttttttaaaaaaatcatgtaatataattgtttttgtacactatcacttatttagcatattacatgtggaatagtgtggagttgacgttttagtgtagataaaaaattgataataaaataaattttatcataaaattataaattattttacattttagtcaagaatggtttaaaatgtgtaagtgatttggtaatataaataaataaagtttttaaaaaattaaattttaaaaatcaactttaaaagtctattttcagactaattttataatttacactgaaaagcttaattttcaatatcatagtgctggcaaacgatgctagaagctttttcaccaaattcggcatccattatatcaatctcagataaggactcgtttttactccatgagtcattggggttccttagataacattcgtatgacatggtatcaattgatgttacgggacaaacgacataaggcaaatgatctaaattatcttccttaaaaaatgttaaaaatgcttcgaaatgttcacctgtgggtaagccattctgttcacaatcatggaatctataggttgaaaccttggatttaccttttataacgtgagtaaaacctttaaattttggaatttgaacatatgtgccaccaatagttctaacaggaccactcgttccatcatcagttctggaaatgtcaaactcgaaattatcataaactttatcatcaaaactgttagcggatgaatcttctgagccaatataagactctaaatcgttaatagcagattctaaatcattaatggcagactctacgtcataattagtagactcagtatcaccaaaggaagaggaatctgacaagtaatggtcataaacaattttagaagctttttcaccaaattcggaatctgttacgtcaatttcagataatgaatcattcctagtccaatcgtcattggggttccttagataacattcatatgacatggtatcaattgaagatacaggacaaacaacataaggaagtccatccaattcatcctccttaaaaaaggttaaaaatgcttcaaattcctttccagaaggtaaaccgttctgttcaaagtcgcggaatttatatagtgagaccttggatttggtttttagaacatgagtgaaacccttgaatcctggaatttggacataagtctcactaatgattttcatgtatccactcgttccatcatctttagtcttggaaatgtcaaacacgagattttttggcactgtgccttttagatgatttttagaattctttgatacggaagtgagtagctgtcttttcatatttgccatttctttactttcaaggtcacctttcttgccattctcacctgacaaataaaacctaggcttgtattcatgatttttcagttgtttggcacaaaaatataaaatcccagagaaaagaaaagcccctataagggataaaagtattatccatcttttcctcatttcttattgatccccaaacgttaaattatattattaatgctgttgaatattcttaaattcgttaaataaaccttgaacgtgttatagcttccaaatttttcttaagaatcccaagtcagataaatggtaaaaattaaaatttataaaattaaattcccgtaatgttattttaagactttattaaaccaatgtgcaagtgttaaatcaaatttaattccaaatgaatgaaaaggcctggattcctaggtatctatgatacacatctcctaaaataatttttatttaaacaaatttacatgtaatgtttttaaatatttgtgtttaaccaaattattttgaagtttcccctttcttatacatgcattttaatttcagttgatatggggaaataaatagtaaaattcacaaaaaaatgattaaaattcaacacattcgttaaaaacttaaaaatacacttttaaattcttttttgtgctagattcctcggaaattggcggatataatgaacattaacacgtgtataaatcgtaatgccgttaatagctcgattcctgaattcatttagaaaaataaaacaatttataattttatatatcataaataaatataaaaattaattaattaattttatacttttctcagatttagattctcggtttatcgtgataatttttaaaattaattaaattcaagttggttgtaaaagcaatttgaatgatttcctaattaggcatagaaatgaaccgaaatcaaggccgttgttgagttcattgactagtctgctgaaatccttaattggtgggtcagatgagattcctaattgtgataaattgataaattattaataccagtgaatctctcatcctcgagtttgagaattatagtacaatttttataaggatctgaacttataagtctagaaaatgaaatcttcattgaaccatctgtagactaattagtaaataaaatgagactaacttaggcttgatatttttactcctagcagtagctccaagtagtaagctttacatgaccaaatatcttgagaatttttattcttaaaatacgattcatattctgaacattaatattataggtaaaaggtaccttcagatttggatgatagtatggattttaggtgagacttttcagttctgagatcatttaaaaggtttttagaatcctcaatttgcttgtaaacattgctaacatcgtcactaattgagttaaaggaaatgtcatttatttgaatttctaaacattattaatattttcatctgaatacctttcagtattgaagatgttgaatgcgataactcgtcgatagttgattttaatgaacgattaatttctgaaatgaaggataaaaatgtataaaattacttgtaacggaagacattttatttaaaaaatcatctttctgattttgaagagtttctttgaccttgttttggtcaatttggtttaaatttaaacggttaaacttgaacatagattcggaaggaacaaacgataacaaatcctcactcattaatgagctagaaccaaataattcagtattagaatgttttttgtcattatcaactgacataggctcattttccatgtttaataattagttaaaaattgataattagaaaatgtgtaggatatggtacaagaatgaaaaatgaaaactaacagaagaatcatataaatgtacaacaaatataatacatattacacgactaaataaaaaataataattaatgttttatacaataaaagatgtaatttataaaaccactacacccgatgtcgtaagtaatgaataaaatcatccatgtaataaatttataatgtattataattttaatgggatcaaaagaagtgaaactttacggaggagcaataacatgccaaattcccttattatttgaagatttaaggtacagtttaatactttttctaatattaatattattagtcagtttcttcccgttcccgacaatcaagaagtctttgtgtatcattttaattcaagtactaattcctcttcaaacgtaactacccatgattttgttctatctttcgagattcttgaatatttacacaaccatgacgacgtaaccgctggaaggtttgatattctacctataattttcatttttaggaaactttttgaggaccttgcctccactaacgagtctagaaatacagaaatagagtatgcaaacccaacccaggctgtaaacttagggttagctcccacgatataatttatggtttagactacctgagacttttgctacagtttcccttacagggacaatggaagttacacgttcaagaaccagaactgagaattttcataaaataacagttctcatgtacgatgttagaatgccaagtaagtcccccctaaattaactatagctcaggatataaatgtgaatttatggtcacatacacttaccccgttgattctggagttccaatttctgaaaataaaaagatctttgaagacattttaagaaccatcagggttgttaatactaatctattctcaacttaacataccatgtacacatacatatatactgtgtaatagtatggatattatgtagagtatacgtatagtatatacggtattgtaaagtatattatccgtatagtagtgatccagacctctcctgttccttgactaatatttcgtagtattggtaaatgatggtaacggcaagtagaataccagtaccactaccgagagcaccgaggaagtcagcgaggatagtcagagcacctatgcacattccaccgaaagcagcagccgttggaacatatctaaaaataaaaatcaaataataatatccaaatataaactaataaatatctaaatgtaaactaataagtatctaaatgtaaactaataagtatctaaatgtaaactaataagtatctaaatataaactaatcaatatctaaatataaactaataaatatctaaatataaactaataaatatctaaatgtaaactaataaatatctaaatgtaaactaaaaattacctgctaaaaactttagtgagtgaagggggagagtccctgtgcccaaccattccaattctttgatctcttaactgtttagctacatccctagcagaactccctgaaatttctatccaagtcttcgagaatacagcgcatgaaactaagacgaaggttatgtacaaaagagtatgtagaggatcattgacaatatccttaaaggtggacgggggagataaatagtaagctaaaccaccaattggaacggaagttccatgatcagtttcctgccactgacccagaagattagcaaacaagttgttcttgaacttcctgtaaactagctgggaaaaaaagtaaagattagaaaccaaagccgtttgcaaaatgattggtatgttagaggtgtagaaaagtttaattgggtacgttcccctctgaccgcgcatactctggtactttacagataagtccactctgaagccttgcaaatatattacgatcacaaatatcaacgctgtggctagcaaatttgtaacattcggtgcatggttcctgtaaaaggcttccttgaaagcggataacttattcttctttgtaaagaaacagtaaaacagagaaataagcgcaccttcaaactcagtgcccttatctgtgcttatagtagtaggactaaacgccttccaaagtatagtttcacatatgtttgtggctataaaaagcgagataccggaacctaacccgtaacccttctgaagcatttcgtcaaacaggataacaacaacacccgcgaaaaatagttgtagaattatcaaaacagacttaaacacgccaatatccttaacgtcaccgtacataccactgactacataagccactgcctcacccaaagtaaccaagagtcccaaaactgaaaacgtatattcccatgaattaaagggttgtgagcacatggaaataaagatttataaaaaataaattatataaaaataaatctgagtaagataaggtttaaacgaaaaagttatttaattgtgtagagtaaacatacgtttttcagctgcctggtataaatcacgatcttccttcaatgattggtcaacatctataattttagaacctgccagaagttgcataaccatagaagaagtaactattggcgagatgccaagctccatcaaagtcccacgattggaagccaaaataaccctcatccaataaaacggatcagatgatttattggttatggccccgtaaattggtatctggcagcatactaggaatataaataaagacatcccagtccacattagcatctccttaaacaggacctaacaattaatttatacaactcaatgatattccttaccttcctggttggagttttgacctccggaagaatgggcataatcggcttaattaagttcaaaacccggactaaaaagtaacatcagttgagatattttaggggaaaaaatatgtagaagataataatgggccttattacaaaaataattaacgaaaactaattgattaaatattttgtagaaaaacttacatcctttacccatggttattaaaaatgattaaaatttcaaaaaatgatcattggattggttgtttaagaatcataatacacatccgttccccatcagaaatttcctactaatattaaaagtttattatgactaataaggatttgtaattaaaatataaatttctaatattttataaaccatggttagttgatatttcattgtaaatatgatgattaattacaagttaatatatttttatttataggacgccatagaagcccaaaatcaaataaaacaaatgattaattttattttaaacgaagctaaggataaagcagaggaaatagagtctggagcaattgaggaatttaatatagaaaagatgaacctgtttgaacagaaaaaagatgaagttaggtcaaagatactaaaaaatataaatgatctccgtctaaagaagatgaggcaaagaaacatggaacttaagaaaatgagtaataatattttattataccaatgtgaagtggttgatgaattaaagaaccttgcaatggagaagcttcacaacctatcacaaaatcgcgatgaatataaaaaggttttaacaatgctgattttatcaggatgtatgtcacttgattctgatattgtttatgtaagatatagaccgtccgactcaaaagtcgttgaatctaccctaggggatgtcaaaaatgaatatgagaagcttatggagctgaaatacaaagttcccaaatcactcactatagaattagataaaaataatcatttatcggaggatgttttaggcgttgttttaaccaatgaagatggaaccatagagtgtaattctaccctaaataatagactggaaagatgctgtcgagaaatgataccacaacttaaattagaactgttctccactgttaacagtaaataatctcttgtacttaaatattcacaatattataactttctctttacaacaaactcaaatcttttactccttaaatccctaagtgatttgagtctctcagactctagacgtttctggctctcagttttcatatcggaaacacgaccggccattattaaagttttcctaaactcctcagcagattttttagctctattgaacccataagcacatctgaaccacctcattctccgaataccattttcaaaccagtgtgcagaccacacttgaagcctacaaataagatcaagttatcgaggtacctcttgtaaaaatcaacacatttaattcttgaaacatcaataggggcagggttcacctttacattatatttacgacttcgccaaactcgatccttgcccagaaaattgtaaggaaaatcatcacccaaatactcaccacttctggtagattccagtctctgcaattaagttaataataaatcaatattataaatgctaaccaaatgattgtagtaatctttggggataaattcctgtaaaccagtaattttagcagttttgtaagttggattaagagataagtgttcaggttctgtaatgtttaatgagattaatatattaaaataagattaaataacaaaccatttatatatggatgtaaaatctctttagttggcggtttataactccgtgttgaaaaacaccttctaagaatcttatatatgagcatttaaaatatataaaaggaatgtcaaatattcatttctagtaaaagtatgacaatttatttaaagaaataatttaaaaaatcaagattagaagataaaaataaaaaatagcctgaaaaataaataaaatgtaaaatagtggagatgatattaacaaataaaaagagtgaaaaattgtagtaaaattgaaaaatatgatacagattaagaatctaaggttcttgttgtggtaaagtgaaaggttccatataggaactaatgagattttgatttcgaaatgaaacaatagtcccgataaagccaactagagaaaaaagaattgaaccaagctggtattgaaaactgtcagaggttcctacgcctggaattccaattaaaaaataaaaggtgtgcttcacaatatcttcctctaaaagaaggttaagggaaattattaaaataactactattaacataaatacatacaaattaaagggaattaaatgatataaacatacccagtttaggaaagaataagagaactgtattttttacaggtctataaggaatgttgtacaagaatgttacaactccaaaaacaaatgcatacaaagcaaccatgtgatcatgaaacgagtttaaggagaaaagaacaccgagagaaaagaatacaaaagaaatagaagcctgaaatataacagaaaaatacaaaaaccgaacgaaaaatctaaacccggaaaagggtaaggaagaatcctgaccaagaggataacctcttccactaaactgactcattttgaaattactataaaaaaatataatataaatttattaatataatacaaaagtaatttaaaggtaaataacaatattttaactgatatgattacagtttgaattgacgtggtgagttggtcaaaaaataaatttccattttcttatttttataaaatttaaccttttaataatatatttattaatatatatatttaacgtttattacattacttttattaacttatctaattatgatgtgcattatccattagtttatgatattatcaataaactctttcacctttgagtctattttgtttgacatatacattgctcgattcctaagagagtctataactatgacttcattgtccttgaaaagctccatgccgcatttaacccacattaatacccttggttcttcattttctcccatttttactataaactctacctcagatgttttatacaaatgtacatttacaagtgatttgtctcccttggttattctcagataattatctttgcccattagttctttatttagtgaaaaaaacaacccgtttgacgatggtaacatatctattgtaaagtggtttgaagtaggattcatcacgtcaacaactatatcattagtagatgtctttcctttatcgaatgagactatacccttcatatatttgtcctgattgttagtattagaaagtttatcgtctgaggagaacacgtttccgctggaagcactttctttcaagtcatccatatctaatttacaagtagattctctgtatttattatcctctaatacgtatttacattttttgcagtcaccccttttgtaacaggtctttacctccacaaattcataaatcaaatcatctatatgagtataaacactcctcaatcttacactctcgtcatcatctataattaataatgatttgttagttactttcccaattttccaccaatttttatacttgtcagaaatcaggtacaaataattatctgattcagttctggtttttttaatatactttctatttttcgatgataaatctaaactagcagaccttctaaccagttcagtgtatactttgactccatttctaagcgtttgtacatactcatcaaatgatctctcaccctcattgtaataagtaaagaccctgactattttcggataggaatttttcagaaatggaatacacagatgcattatatttccgtatccaacatgtcgtgatacgtgtaaataccttaatctgatattggtatttgatgaatctgaaactatcactgtatttccttcgaatatactacccattctatactgcgttgtaatttcattccttatagcatattcagtccatccttctatggtattatttaccttaagtacagttttgtcaatccttccaatgtttacgtcaatgggttccctaactatttttatacattttttgtcaaattccgtgtctattattatgaactcgtcagtacgaggaacatcgtttataattgtcactacttttatgatgtatttttctaatatacgtcttaatactttgaagtaaacaatcctttccgatatatcgtctttggtatccttcattataactatttctccatattttacctccccaattctcttgtttgctggatctataaccttaaaagttgtccattttctgaacttggatatctttttaatatcttcgttgagtgaatttgacttaatatctaaattaacaacttccttaagggaattacaaggttgaaatactacaccttgcagtaaaatagaaattaacaaataaaaaaagttaaattttagtaagaacagtgacattacaaacaataaaaaaaatgtgtaagtatttaaaacaaatattaataatacatttaaaaaaatagtgaaaattacaaagacaaaagcttaaataacataattaacaacaaataacaatattatgattagtttgaataaatatttaactggttcaagtgaatgatgaatagatatgcccctaaacaaacagctagccaagtatataaaacataaaacatgtattatttaggttagataattctaagaatgtattcatgaatcccttaataaaaatatatgttatttatgtttttgtagaaataatgtgtaaaaaatgttgaatgaatttagacataaatggtattataattttatcccagccagttaaggattaaaagttgagataataatcataaataaacttaaaaataatataatttaaaatatacttaaatgaaatagaaggattgtattatttgttaatcccattatagtgaatataatcgtaaggtaaatcaacccaatactctggattccatattacatgttaaaataatataagagtatatttattaaaagatgtaaaatataattaaatatatttaatttaattgttttatggaataatttgacttgaattcaaaaatgtgatgttaattgaggtcctatagctcagttggttagagcgtacggctaataaccgtaaggtcggcggttcgaaaccgcctgggaccacacttttttaattttattttttaaattattttttaataaataaatgaaatctttgattataataaagttaaaacctaataagagcccagtaaatagagttgtttgggtagtgtagtggtattcatccaaaaatatggaatcttcttataatctcacaaccgatgatattcataggtgtagtgaccagttaaaggatttctttcccaagtttttggaactttcgatagatgaattgaaaacttatggcctatctcagaacgtccttctatattactcatacgctattcagtataatttacaaggtgtgccttcatacttaaaaatactttaggagggaagatgctgagaggaacaatgttgatgtcaaccgttaaatcactctgtggtaccaacattcctgagaatcttacgactcaaacattaatagctggtatgtgtagtttaaatcatataaacaatttattttagcctggtgtgttgagttattgcaaacgtcctttcttgttgctgatgatataattgacaaaagccttaaaagacgctccaacacatgctggtaattgaaacacacaacattataatcttacacatatttacacacttatgatattaccgtttctaacgtagttaatttattttgtattaggtatctggttccaacaataggagttgaaaacgccataaacgatgtaatgttcctttataccctgatctaccggtgaggattttaatatttgttacatagtccaaatcacacactaataatctcaatcagaatactattcaaaacattaaaggataccaaaaactttctggaaatagttgaaacattcaacagaatttcaatgaccacaatactgggccaacaccttgatatctacgagtccaacactaataggttgtttcaagattctaatgaggcaactaagctatttgctgaaatttgtaagaataaaacgtcctattattcattctttctgccactaaaattaggtaatttcaaaagtcgtaacacatcctaggcatggtgttaagcggcgtggaactgtctaacctgttttattctaaagttgagtcaatatcagtccttatcggaacattgttccaagtaatttttcaatcttttaatgtctgtaggcacaagatgattatcttgactgttatggagatccagaggattttggcaaaaacggaactgacattcagactaaaaaatgctcctggcttctttgtcaagtattaaatatttaataataaatttcattaggccttaaatatcgcatcagatgagcaaaagaatctgattaaagaaaatataggccataacgacgattcaaaggtggaagcggtaaagaatgtttataaggagctggagttagacaaacactttttaaaatacacaacatacgctgaaaataagattaacaggtattacacggtgaaaaaattatattttagtgagattgatgaaatagataaccaaggtaaattatagaaaaattaagagaaagtaggaataaaaaccgttttaaagtggtgtctagaactcattagaaataggtcaaagtgatacaaatacagtgtggaatcataattcaagagatttagacttggattctcttgaaggaggtaattttacgccgagaactcggttcaacttttggaccacctggccatttggtatcccctattattttaatctataaaatacataaacatacacttccgttctcatattcctttattaaactttcactttcatttattgctcgagccagctgaagttgagtcatgttcttggccatcctggccttttgtaaagcggtgcgaaaagcaaatgaaaccctctcgatgtgaaatgattcattttcattctcaatttttgcagcgctacaaatataataagtttaatgtttgaaaatattatataaatcaggatcaaaatcctaattagcaaagaataacatacttaggcggtagaaatgatttagttgtcttgttttgacctcctagaactaaaataatttaattaaaatttaaaaattacatttcttctgagtatcaagctctactccagcacgccgggccttgttaagggcagattccttattagggcccttgaaattctcatgtttagtccaaactactggcttccaatcttgatatgacattactaatgttgaattatacaaaccattaaaaaataaaataaaagtaaaataataaggagaaaaacaccatagatcatcacatgaattgtagtggatcatatattgagttaaaataaattaaaattatttgatatcatttggtgggatctaaaatgaaaataacttattaaaattgattttacaacctgaggtgtatagatcctttagacgatagaccaatttataatcagtaggacgccttgaaattttatttaaaaaaataaataaattatatgttcaatgatatatataaatatttgttgattaaatacctcttttgaatagctatctcctcaacagctgatttgacattttgtaagggttgacctgtgagttgaacaaccctcttgagttgaatcccatcttttgcttcctccgactcgaatattttgaaaattttcagtttcaactcatcaggatccattgttggtaattttttgcctaatgtattttgtttatttgtttaataattgggagataataatttgatgtagcttacttttggctctagaacggttatacggagtatcctcaagagggcgtgaaccatcatctgacatcaatccagcaactgtcgttgtttttggattataatatttgaaaatctgaagcattaagtcaataaattttgagggtttacagtttcagaagaatcaaaagatggatcctctctagtttcatcagttgtgctccttgctaaagatgatataaatgttattagatacgttttttaacgtttgtacaaatatggcgttccttgagtttctgtaaattaaaatgttaacaagggtcaatattgatataagtgaataaaaattacccgtttataggcctggtccaaagaaggaaaaatagtcaaacattctgaaagtttaccgataaatctcagatttgatgatttagggtcgatttgtacagcaacaggattggataatgtagtttttctacatttaaagaaccgaaattcaccctcacagttcactctaaattcttctaattcgccctagaatatttacacgttaaataggtatgtgtaccaattcattccgtctacaattgccaatgatggagtgattttcactgtttctccactgaagtgccaaaaatttagggacctgatcatataaaagagattctaagtaaaaaaatactttgagcaaagttatgtcaggaattttagtttccatgataaaatacaaaaatcaatttattttaaaacataattaactaattaaacatgtattaatttacgaataaaataacaaaatacaagaataaggataaataaaattatatggtagtaagaataatatgtggcaattattccttaaaatataaaacacatatcacaattttattacaaattcatgaaaatattattgtttggacttattcgattttttgctaggattagaaggttgcgaaattatgaaatccagaactattggccagcctggatcatccaaacccttaattgtgttaacatttttacacattattcttggccctagtctcgaccttataggctctaattttttcataaaattatcatagttttctcctcgaaataaatcatttgctccattgaatatcacaacaaatcgcgaataagataatgaactctcagattctaaggaacacatccaatttataacttcagtgttcttagattcattcatatccaatatatttacaacaaaaaccacacctttaacttccacttgtctgctcacaaaattcggaatattccttacctaaaattaaatatcaatactttatgtaaataatatgattagtggatgtgaactatttaaaaaggttttctaaacgtatgtatataatttttatgaatgtgtatacaacaaggtctccactgaaatcccataatcctagagttttcccgttatgtttaagctcttcataattatataaaggtgtaggctttatttctgagtttgtattttcccattctaaaagtttttacgtaaaataaatgtgtaaatccacaaacttggaatgagagttttatagagcaatagagtctttcccgagccctttaatccacataaaaatatgtgtatagttgaagattttttcatttatcatacaaatttaaatattaaaataaattaatgaatattaataaatataaaatatgtgttaatgagtgagttaggtactttatatatgggtgaataaaatatataaagatgaccaaaataaagaaagtaatatgtagtttaagagaaatcaaattttatatgatgaaaaatgataatgaagatagaattattaaaattaaaacttgaaatgggtgaaaaacgggtaatttgtggagaaatataaatgtaagagtaataaaatgataagttttgacatgttttggatgttatcaacgcatatggtgaagttaaaataattaagcgctaaaatcattgatatatgtgttgtattattgtagggtttaaaatcgggtgaaaaggcaactgatcttctactggttttcattagtatattcttctaatttgtcatttttatagttttatagaatatttataaagatattttctattttatgctttacctcgtttacgaagggttgaatcacaatattgggatttacttttcacaaaattcataacaaattgatctttcaattgtgaatatttatgaaaatatcagaatattagctctcgataatattagtattggttttgttatatcataattgaagattcgtatattactttgataaaaaatgacaaacacagaagtcgccctgttccgtaaatggacatacgatgacgtcagtcttacagatttatcattggtacgttgattttataaatatactttttcattttttgtttgtctatcagtctaatcttgtagataattttataatttatttgctcaggtggattgcattgcaatacaaggcaaagcaagagttttcactccacataccgctggaagataccaaaagaaaagattcaggaaaacacaatgcccaatagtcgagcgcttagtcaactcaatgatgatgcatggaaggtatgttgaacacacaataatatgatgattgaaagttaataagccgtatggcgatgaaagcaatctttcgcccctatctgattacataataaatataattataatttctctcaggaataacggaaagaagctcaaagccataaggatcgtaaaccacgcattcgaaatcatacatgtcatgaccgataaaaacccagtacaggtcttcgtagacgcagttaaaaacggaggaccacgtgaagattccaccagaatagggtcagcaggtgtggtcagacgtcaagcagttgatgtttcgccgttgaggcgtgtaaatcaagcaatttacctcatttgcactggggcaaggtaattaatctttcatatcagttttctttaggaacgcagcatttagaaacatcaagaccatcgccgagtgtctggcggacgagatcattaactgtgccaaggagtcaccctcgtcctacgcaatcaagaagaaggatgaaattgaacgcgttgctaaggccaacagataatttaatttgatttatatcaatacatatatgtataattaatgtagtgagtggataatatctacaatttatactgaataaagctgggtaaataagtgaaataaaaggtatgaataagattaaagtttaaggaaatcatgcattaagctttgtagctacagtggttttatattacagtacttaaaatttgaaatcatgtcagtatggccaaatcattttaaattatagcccaaagtcatgtaaaaacatctttggaatatgatacaatgattaagttcctgaagattttgatttagtcttagatttagctttggttagagatttatgatgtttaacaatgtcattcaaagttgaattaaaaacatcctcattacatgggccccaattaccatcttcaccgcgaactgcaaattgaagcttctttcctttcgtgtttgtctttaccaaaatctgaacaagaaaaggagcctcatccttcaaaaatgatctgaccctaatacaagatcctaatggatgaccacaataccaaacagttttgtctccagcctttatataaaccactggattatttgctttgcattcaacgtcatgaaattttgcgtaattattgtgaacccccgttccagaagtaaatctaacactatcgaaaggtcctgataaatcaaggattaaatgtgcaggaacctgagttgtttcaggagcatcaggggtaggttctccaggtgctgaaggttgttcagatgctgtgggtttgggtgtgggtgttggtgtgggttctaatttagatttttttgcgggttgttctataggcttatcagtagtttgttctataggcttatcagtaggttgtcctataggcttatcagtgggttgtccagtgggttgcccagtaggttgcccagaaggttgtccagtgggttgtccagaaggttgtccagtgggttgttcagaagtagattccacaggagcagtagaaatagtatctgccaaatgagaagaaggcgcagtggtcggagatgaagttggttgggaagtatccattgtcgcctctggcattgtttctaaaagtgccgattggtctatgaattctaaaatttctgaagtatccattgcctgttgatctgttgtatgtgaaacttccattggtgttggtgcgccagtttctggtggtaatggtgccgctgtaattaaagcttgttgtgcaagctcagcatattctgcggtaaatacatgaaaatcaatctccttccattgatctccctctagtctcatgaaaatatcctccttttcgtgactgtaatcttcttcttcaagtcgagcaagtaaaggaatatcatcatgcatgtaaataaagaaacttcggagatttatgtgtttaggagcagtccaaataactgtcccttgggaactaacagaactcagagattgttgagtatcagaaagctgatgtttgtagcaagtaacagtttcatccattttggtaacatgcaccctaggatctcccgatgatatatcgtagtcaaatgagctaggcttgacagaattcttaggaatcgtatgtctataatactggaaaaactgtaagtatttagaataaggaacgggtctccagccatttctgaatactaaaaagtggctaaatgtataaccataaatagaaacctctttaaaagctagaagctttggaagagaatcgtgataacacacgtacatgctgtgtatatatgaatataaacttggacaataaaccctagacctaaagtagaaaagagatgccattaacttcaattttgaaaaaaacgatctaacaattaaattgtcaattattactatattatcatcaaattcggtgctttcgcctaaactgggaagtgtaaacctttgcctaagatactcataacctcgtacacgattaattaaactctcaaaaccgttagaattcaagatgtgccatgaacgattaaaatgtgaaaggtgtttcgtgacactttttggctgtgataatttcaattcagctaaaattggtcgatgttcataataatagaccctgacatgagaagcaagctcgaaatctgcggcaacccacataatctcagggccgaaagtgagaatattaaaatgtgcgtttttattgttgtagctaatagtgactagcctgtgagttctatcagctactggattataatttccggcatttgtcaagtccaaaataactacattggggtccactgcgataatagtggagtcaaaggcagattttaggctaattatgacagcctggaaaatttcctcacctattatttcaacaagcccgtcattgtaaagaatatagtcaatatgctcagttccatttaaatatgaaaaaattttgaccaacttcaaaacaccttcatggtagtatgcagcaaccttaagacagactccatttgctaaacttgaagtccataaagtttgattcccaaatttaatctcatgaaatctagaaccattattcggaatgaaaattgtcctgaaaatatattcatcaaatctggaatattgagttaaattctgactataagtagatagatcaaggacttgtggattgtaattggtattaggatcgtgcgattgagcggcttctgtcaaggctctgtgattatcatttttatgattatgtaaatgtctttgaaccaagaaagaaaattctgcttcagtccctactctgaaaacgctatttccaacaaccctgaaaaattggaagatggttaagttattagtattaatgattaattttaccagcacaatgctctttagataattgtcaaaatgaaattgaattgatgtgcatctatctgtaaatgacgaccacataataacttttccataatttacatatctgacatgataaccacttaaaggaataatattaacctcatctccgttttgacgaatatatgagtgctttatttcttttcttaaatcaaacataacgttagcttggagatgaatctcagattgaaactgaaagaactggttgctgaagccttggtaatccaatggaaccaaaactcctttagaatcgaaatatttttcagtttgttggccatctttaaatacacctatagtcaccaaaacgtttgttgaattaaatgagtgcatagtaacatgggtccatgtttcacctggctcctgaaaaacttcatgaatgccgtgatttaatctaacaaaaccgtaaccttgtaagggaacaggagaagaatagtatactccatcatgaagcatgtcaaacttgttaaagagttgcgagttattagacaagtgagtagaaaatgaaatactattatcaaaattaggtccagtcttccaatcttcaaatagttgtttaaagtcctgttgggagcaagcataaagtcgtccaaaatttctggcgaaataaagtctcctaagaccagctctgttgatgaatatggtcaccaatacaatcaatttgcttcttaagaacaattctatcttaaccaacctagcctctcttctattatgccaaagtgtgtatcctgtttccacaacctcaaaaactgaaattccttcattagggtgaactgtaagaacctgatagtcattcttgtttgcagagtctacagtgaatgatgtaccgattttatttaaatcaatcaccaccgaatttggaaatggtggagtacgaggaacaaaagccaaaggggttgagggtctttccattggagtagttacgacaatttgatccagtaaagttggatctggtggtgttatcttcggatgtaataaagtataggaaagatcggggccctccggaatagaaggaggagtaggtaaaggaccatgaataacaggagttggagtggttgttggaacaagctgtgttttaagatagtcttcatggtattttttacttttttctaaaaatttttgatgatcacattgtatccatgttttttcttctaaaacccaatatactgttggtttgggagactcaaattttccttctattgttttaaattgatcacccattctataaccgctaatagataggacgggctcttcagattttattaaagaatcgtttccggaaataatatgatgcatagtatagccatctttaggtttgactgttgttataggaacttcattgaaaattccgatagatgtatcaaaaaccataaagtttatttgtctgcttacatccagatatggcgtcgaagctacaagtgcgttattagttaaaatgaatttataagaagcatgattttcatatgtttctttgacaaaaccgtgtttttcccatttgtaatataaaatctcttgatttgctccatctgttaggataagtttagctatctgaggaactaagtttaaagtttcaagatgtaaagatacaatgcgccattttagtgtaagatcttcataaattaatattggtccaagaacagctctggatagttttttgcctgccttaggactgaattcgaatattttgtaaggatttggagcgggtttggtaggatcttgatctggcttgtatctacctatatttaaggtaatatttttgattgcggaggtcgcgtttaaaaaaacggcaaagatgatcaggccaacaagtttcgaagccatacataacaaaaatattaagaatacaattcataatttgtagatttgtatgaaggctgaagtggggaattagatctttaaaaaattattattcctagtgactaatattacttacacatttctgtcatactttgaaaccaataggttttcataatatagatgatttgtaaaagatcttccctaaatttaagttttactccccatcaacatgtgtagtgaaccaaaagtttagaattcttttttatattctagacatattattatatgtaacatcctgatcttacttgttcttaatgtcataatacgttattatgtagtttttgtaaaatatctgaattgttttacacagatttaggttgtgataattatcttcacgttctgttacacatttcgttaattaactctaaatatataagtatttaaaaatagtttttaatgagtaatccgaaaattaatcatttaaaacattaataactcttagcatatttaccaaatcaccagatatgtgaagtccttgccaacggatccactctcctattaggaacctgtcatagttgaaaacattatatatcatggtcttttccatgtcaatgttcttacaaatgcttagaagatcttttataactgaagatctaacaccgaaagtgtgagatctgattaattctgatatcttatccagtattgatctcacatccttactttctgtaaacttgctctgttttgacaaaagtttaattatttcaaagtttgcaggtgtatctttcactgtaaacgaagttaaagcaaactttacgaactcattcatgacctctgggacttcgttgtgcgcaaaagctactttttcaaactcctcacatgttttagtcactataactttgcaaaggtcgttgtggccaaaaacagtatcgcagtttctcagcttcttggatctccaatcatgatatgacttcaaaaatacctccattggcattttttgaaatatatcaggaagcgaaatctttctcccatccctcttacttctaggcttttgggtactggttgaagcctcaggatctacgaactcttttgagtatagtgtttggaagtacaccttccacttatcagaatatgacttttggtacaatttaactaactttctagcttgtactgtaaggaaatgcttgtgtgttctattacttgaatcaattagtgacagttttggggcttctagcaagcatttattttggaattcaaagaagtacttcaacttgtttatggagcccaggtcataagcatttgtctgggcctggagttgaacctccttttcaatcgccttaattgcacattctctcaggcgatgtaacctgtcagtgaactcagacaccctggaacccagacaccaggcatggtaaagtaagtcaattgggtaattaactttattctgggaagttatcaccataaatgagtagtctgtgtggtggagatggtaaaaggatctgtaatctaagagagcttgaagctcaagaacctttttgtcaaaaactgaggacttgatattttccaagcactgctcctctgtgtaaatgtgtgaattcgactcgaccaagttgtattctatatttagttttgacgtaaaaccgaagttaaacgggtggtatatgtccttctcctttgatattgtgaacatattatacattgaaagcatatccatctttatgaaggacacgaacccctcaatccaccagaatagtgtcggcgaattaaggtacttggagcctggaaacagtaatctgaacctcgagtacaaatccacaaactgctcgtacagaaacattcgataattaaaccattgtgtcaaccatgaatatacaatcgacaggataattccaagcacaatggccagcgatatataaaaagcactgtcgctgtcgaaggttgataggaatccaaacgaggagttaaagaagtatgatgtgacaaaggaataaattataattatatacataaatttagtcttgttgggaatattcctcaaatacggcatcagccttgaaagataaattaaaaataaacaaacgaatgttgacaggaaaaataggtagaactcccacctcttgtaatctgacactcttcctataattgtctttttgtaatatgtgatcatcttagaaagggatttacttggcttaatcagcatgcccattcttgttcctctaattgacttgtacatattaatattctttgaattcaattcattcaattggggtttcaaagattcgctaagtgctttaatactttttttagattgttcgttcaattcagtaacgagatcagcagtagtagatacagaatcacataaacatttaataaattcaccaagcttttctccattagtacaaccgtttgtgccaacaccagttccacagcatttactgacagattcagaacaattttttaatttttgagctgagcaatttaaccttttgtagtaacagtctaatttattatagtcaacaatgaaacaaacagaaacattcgatgtaccaatctcattagttattttatcaatcatacaacaaacttctctcatatcggatagtaaattcctcaaacattggcataatccagcctcgtttaaacaaaaggaacaagaactcgatcttatatggcctggtggtaacaagctattcattagattggaaaattgtgaatatattcctgcaaacactgttaagacgttagcctcggaaggttgagtaccagagtcaacagacgggggtattccctcaatataatatatgccatcgtgaaacattgatggatatttgaatgatgaaaaactagctagaactgatatcacatttgccaatatagaatcagaatctgtcggagtttgaatggccaattcaatgagagtcaatatatcatcaactctcgagttatatctgcaacaaaaacacgtcgactgtcctatgcaacaacaatttttcaaatcttctgtacacttacaggttgccttttcttgtagaaaatccgaacacatgaactctccaaaaaatgaagccaggagtataattgctctagaaatcgacattggaggcattacgtcaataatattctcgaggttattgcctctgaatatatcagaaactttcttctgctttaaatgtaaggtactaatacatctgatcatcttgcagtacatagtacaactacatttaataggtttatcatcaggtttttctggttctcgtttgtgttcacagttacagccttccctgaatttactgcaaacaattcttagtctatcacaaatgcacttcatatatttgtgaagtatcaaatactcgtcaataagtctgccataaatcatacaaataataaatctcattaggaattcctctaatatagaaagagaatctagcatctggtcataatctacgtcgtccaagctatctaataataaaggacaggtgttgatgtcgtaaagtagtgcattacagtcctcaacagttgctgtaatcgcattcttcatgtaatttttaatttcatcgcaaatttctttactgcaacagcaagttccgctacaggcaagaatatttaaagtacattttggtttacagcaacaacatacgaaaatgattactgataaacagcatacagatggagaagtacaggatttaaaaatatcatccaacttggaacttaatacatttaaatagttaacaagtgaacaaattagccataataaaatgtacttgttttttttaattgttttgtaatgttcttttgggtgagtaaggcgggtacagccaagcttaaagtactcatccgggttaaagggctcctcatctctaatatctgtgatagtgcaataaattgtcaatgcattcagaaggcgattaatatcaaaattgtcgtattcctcccattcacaccaatatccatatggaagtgactgccaagcctggacatccctaaagagtctaacactcaacgatttggataaagcattcacatcttctcgaacgtcttggtgtttttttactttggggcttaggggaacttccggtctatacttcatcatggtacaaatcgacctatacagtgaattgtacgtgtatcctcttttcttaaatgacagaacatcgaaactgtcaaacaggtaaaataaagcagagactataactgaaaccaaaaattgataatactccagcctgaaagaaacttctcgcttaactgaatgcataactggtaaggttagattatttaacatcgggcacatggaccaacaaaaacaggcaattgaaaaaatccaggtgtttccaacaaatgttggtttagtaagcggtggagggccactgctaatgagatcttcatccttcatttctatggatttaagcgtagatgtgaggaacgaacaaattaatgctatcaaggtgaatgatataaagagtctattgtacatttttagggtattttggctatcggaatatgaaaaaatcttcccagtgctcagttttattaaaatattcactagtatccctgaagtgaaacagcccgttgaaaatgcatagaatcgagattgtggtttatgatcaagaaatataaaatccctcgcaaacattaacttcactgatgacataagcagaccgtgtgatgataaggaaactaaaactacgaaaaataaagaaagtttgcccacgaacaaataattgtttgaaagagaatatacataaaatgaagaaagaaagtaagaaatgaacaatatccaactccaaatcttgcaatcagatccgtgtccaatagccatagaaattgagcaaaaaattaatcctatggacaaattaagccttcttaaaaagaacgaaatgctttcggcatcgtaaattgtaatccctaaaaacctcaggtaaacaaaagaattcaaatcaagcatagggtatataatcaatgaactcaaccctaaaaagaagaaagttaggtgagtattgatgagggtattacctcttgttgaatacgataccattttccagaggaaatctaggatataaatgacaagtaaatcatattttacaatttttaaaattagaacaatgtttaaaaataaagataagagttgaagtgcgaagtaattaatcaactatcatacaaagtattgaaattattaaaatgaaactaatgaaagatcacacattatattgtacataaaattactggggaaaaagataaactacattttgtattataaccgattttaggttattttatgagggttgaaatgaattcgatccactttataaatttagagttaaaaatcatcattaaaggtctaaaaaattaaaaataaacaaaaaaattaaaaattatactaaaagttattaattcatcattaaatagtctgtattcatgaaatattaaaaataaaatgaaaggtaggaacaaacatagaatcaaatccccatccattaaataaaaaataaataaataatgaaattattcttttgaaatgtataattatctcaatatctttatataataattatcaaattaaattattttttatttatatatacgttttatttaggtacaactgtttttcaatttttctttgtagaatataattttaatttcattctgaacttaaaactaccttaaaactcttaatcatgttccaaattcatcaattgttaccacaacataccgtaatcgttgacgtgaatggtctggtaaataggaattgatatacacatagtaaataaagatccaattgatacactaatcataaattggatggtttaaactaagtttatcatgacaaaatttaattaaatttctgacaatactgatctaattatccgctagcatgacctaaaccaatcctttaaacacataatttgactctaaatgttagcgcttaactatagggtttttaaaaaatcataaatgtattttttgtattaaaggttgtggaaatttgaaaatggaaccaacataaatattggatcagattgggttaacaacatatttaaaagtaaaaagtggtgcgtgattataacactaattatccttaattgcaaattgagaagacgcaattaacaatcaacaaaccataatattttattttttattccccatgaataggattcctcttatgatttaaagtaatttattatttaattaattcacatatttataattgattcatttaatatagatatttaaataatgaactgttgcgtatttgagagctaatttttaaatatcgatgttacacactggaaattgacgatgattcttaatttcttaatggatccagctataatatttgggatgatataggattgtacacaatggtaagatttattgattctatcaattgataaattgagatagataaaggtaatacaataactattatttcagtattcattaaatattaatatactatctcgattttatattataacatttattgactgaggtaatacaacattttgaaacattagatgaaataaaaaattcttagaattcgatggaacttagtctaattttgacgaatgtgttgattgaacaacgaacataatcgtattttacacaaaggaacattctcctcgattctgcactcaaagagtgtactaaactgatatagacatgatataattaaacctaatctggtttgatccagtgtaactggtactcgttagatttattaactaaaatgtaacatgtgtaacataggaatatatcttattttgaagaactacctaaatgactgatgttgacaaagatcgaacgtacgcagtttttaattaaattacagatgtaaaatacttaaaatctcgctatatatcccaggaactatgtaattatttaatcataatggagaaatgacctccccatgaccaagttaaaaatggccaattgtatcataataacgacccttggaagggaataaatcatggtaagaattaagaatcgagatgtaaataatattacctaaatatgaagccatggggagcgagattcatggtgtatctcctaacctggaaatttgtggcttcaaaactggaacataataatctagaacttcatccttctagacttaaaatatatacccttgatgatgatggagtgccggttgaagataaaactaaattcacagtaacatctgatggaatgatatacacatttaggcttaatgatggagttagatgtactgaggtaaaatttgatgagagtacattgtggaaaacggaggaaaatgatcttaaacaacccaaatcagtgttgataggcacgtataacaacacaatcaccattgaattgagcaataattccaatttagtttacaattttgatcccgttcataaaatattctacagcgagaggggtcaattccttccatctgttaattttatatcaagtttgtcagacgaaaagcaacaacatacccgtagaaatgaagtttttataactcctacccaaaaattaactacacccagagcatattgtcacgatgagtcgaatgattcggaccttgaaaattcaactccaattgttatagatataacaaccaagggaagtgcatatgaatttgacttctttaaaagtggtaaaaattcaatatattcagcgaaacgaggtttctcaattaagttggtaaaaaaatcaaatgaaataatatggaagtcaaccaaacccagtgactatgcaagcaaagtcaatgttttagatacagacaagggaaatattgttacagttcatttgtcttacgaaaaaacgagacagtattacaaatgttctaaccagtgggttgaaaagggtctcgtagttattgatataaataaaacagagagtacagcaagtttccattactccaagtataaaaattatactacatatatagctagaaataattttttcatttcatctgtgaaggaaggagagtcgactttttccccaaatattaatatttttcaagctaaggacgcatcagagtatctcagcagcgtaatggtccattcaagcggtaagatgacactgtattttgcaaatggcaatatgaagcacttttacaaaaaaaatagaaaccagtggtacgaaagaaagccagaactgtcacttgacattagaacaaaagaaaaccagtacgaattcgggtattcagaggataataacgtaggtacatattttcccaaatataatttcgagtttaaagtagtaaaacagggtgataatgttatcttcaaaactgtagccaatgaatatatagaaaaggtaatatcagatggtatgagttcgggttctagtaaaaatcttagtatttacttttccaatggagatgtcaaattcttccataggtctggtgatgaatggactaggagaccttcagaaattacccttaatattaagaaaaaagaaggaactttcgagtatgactgttttaataaagatagtatttatattttcatacctaaacacaattttatgtttaaaaggatagtacaaggtgatggcaatcttgttgatatttgggtttcaaacgatcaggaatactgtaacaaggttgtattaagtcacgttgagagtggtaaaaatttgagcctccaattaattgatggtaattttaaaaacttctacaacgacaaaagaaaagagaagttgtgggtagaaacctctaagactgattttgtaatacgtgaatctttaattaccctagacctagacgatgccgagactaccaagcactattatttctatttcgatgatagatcaaatgccggtgtattcatgtcaagggagggctaccttttcaataaagttatacagagttctctattttcaaacacagtgaacttgtgggaaaccaacaatagttcaatcttttccaaccgagtcgtagtgtacaatgtttacgaaaaagaggtcattttagatatatatcttgtcaatgggaataagctccactttgacataaagtatgaaataaaatttttaagtaaaagatcctggttagagagaaagtcgtatttgcccgtatcagaacaccccaaaggtgtaacagttttgttgatggattcagcaaatcccaataaccttatttcaaatgacacaaccaaatatgtagtcagtgtgaataagataaatgacgctaaacatgattttccagataaaatatcctacgattatagattcaaagaagaagccagatgtgtagaatttaaagttgatcataaaacagtgtggaaatacgatcccgatgcacatgaatccgtccctatgtctatatatcttcacaaatttatgaaactagcctttgttgaatttaaccttcattctttagatatatatagttatgttgatggagaatggaaactaagcttcaacaataagctgaaagggattaagatcgatatacaaaccatgaagagcactaatgtatattatttctatattgatgaggaaacaaacacaggaatttatgttccaaaggagggctacttcttcaggaaaattaagcaaagtggttcatggcattcgccatcaacaatgaatgtttgggaaacctttcactattacaaatattccaacgctattgtggtttacaatgtagataaagtcagatccattgtggttgttcatcatattgacggtaataaaagttatttatcggtagaaatgaattacagattaatatctatgttcgaagcgaaaacgtataatttacatgtatcccagtatcctgaaaacatacaagttttgacggaaaataatgccatagattaccttgttgatgtgacagtattgcacaaaactgatgaagagaacagagtaatctatgaatatgtgttcaaaggagacaggtgccttgaatttaaaattgatgatcagttggtatggaagtactatagctcagaagacaggtttccaaaatcaatttattatcacaaaaatgtggaaatagtcctcatcgaatttaacaatcattctttcaccgtgtataagcatagcgaaaataggtggaagatgaaatctataatatccacattttgtgatagagttataatttctacattggatgccaatggtgacgttgttgaaaacgacactagcaagtataacatcgataaaagtgataaattcatttccaaatacattttcaacgatgatgcaaagtgtgttggattgaactttagaaacaataaaatatggcaatatgaaggtggtgattaccctaaagtgttttatatccacaattattttataacactgtatattgaattttcaaatgattatttctattcctataggttttctttgcaagaaaacaggatgaaatttgaatttttaagaaacataagacggatcaactatgaaaaaataagacttataacacagggtgctgattatcaagttaaaagatatgattttgcttatgaattcgagttcaaagaaggttgtaactgtttagaatttttgtatgatgataaatctatgtggaagtatgatggtcaatatccaatcctaatatactttatttcgaactttgatcttcagatcaaatttagaaatgaaactgaatacatatccagtgatagtaaaataaaatggaaaatgccagggccttcagaacttgacatcgaaaagtcatatagtactgaagaatttggtttttatattaatggtgatgtaggtgtatatgagtccaaacctaatcatgcagccaatattgttaaatatggtaatttaaaattatgggaagccagtgatcccaccttattcgttaaaaaggttgttattgatggtatttataacttaaataagaacattgaaatatttctaaacaatggctcagttaagcagttccacaaaatgggcaagaagtggctctcatcaactgctattgttcttgacattgacattaatagcaataatgatctattcgaatataaatcgacaagaggattcggtcacttcattcctaaacccaatttgacgatcggaaggattgttaagaaaaacctcgatatatggtgggcatatccaaatgatcacgctgtccaggtggtactcatgggttctggccctgatgacaaatatatatcaatacttctgcagagtggtaactttgtacttcttcaaaagcctgatcatggtgtcttctgggaagatataactcggaggagaaatttctctggtatcaagatgtactcatttgatgagggcaagtccaggtatcgggaactaactagggatgattacgatccaacagtattcgaatcaacatatgggtatgagtttaaagatggagtgaagtgtgttaagatcatcaaccatgataaagtattatggacatatattgatgatcctgagtttgggtacgtgatgggtatatatctggatcttatttcaaacactttcttagttaagaaccagtcttttgatatcaagaatcttgtcacccaggtcacgcagatcacaaagatcagcgaactcatcaaggttactcttgacattgagaataaacagaccaccagtgagtttgagtataagaatcacaatggaaatttcacatacactcctaagcccgggtatgtgttcaataaagtaattcagggtgatatgattttttgggaatctaaatatgtttctggaactaaggtgaggactaaggttaaggacaacaagagatacttaatcatactcctgagtgacaatacattcaaacttttcgagcaatcaggcgaaaataactggagatgggctgatacaaccaataccaggtatgacgtaacgagattcaaattctatggtgacaatgacactactctgacccaatctgattacaaggttaacatcgttgacctatcacttagtcatatattcattgatggagtcacctgtaagaaaatcaaatatggcgatgatgttatttggaaacatactgacgatcccaactattcaacaatcaagatgttttctattggtcttgcttcaaacagcttgtatgccgtcaagagtgaaactgattttaagaaacttgattataaaacacctattcaaaccccgaacataccggtgatgcatgccacccaagtaactcttgacataagtaagactcagaccacagatccgtttgaatattctattaaggatgattttggtacgtataaaccaaaacctgggtatgcaataagtgtcgttaaatgtggtactgaagaattgtggagaaccaatgatcccacattttttgttgacaaagttgttgttaatggagttcggcttctatctctaaatgatgttaaattatatttggctaatggagatgtgaaaagatttataaaagttaatcacagatggattgataaagaaaacccattaactttaaatatagatgctttgccagataacaattattttaattacagcaataacagcgatgcaataacatttacccctaaacatgaattatttattaacagtgtaatagccaatgatgaggttatttgggaaactaagaagactattgagtacgcaaccaaagtaacaattaaaggttttaattccactccgaagatattaatcatacaaatggttagaggagatgagatcgtctttaattatggatatgacaacaaatgggaaaaggtgggacatgaaggagataatgaatctgtctatccagaacgtgtaacaactgatgattcaccggaacaaaaaatggctacagcgacatatcctgaaactcctacaattcaacactaccaattaaaccaaccaccctctaattatagttcgcaaattcaagcaaaagatagatttgacaactggtataattacacaaaaaccaacttagcagtgagaacaaacacaccgaacacaactcaaattgaataacattaacctttccaaggtattattttttattatttaatacacccttcacaacaatcaaaaaatcatttaagtgtaacattagatgtaacatagttttaaaacaatgctgataaagattctcagatataaactagtgtaaattagatttatttttcaatttaaccgtctgtttgaataaaacagttgtaaaataatggaagtaacatcgtcagatgttctattttaatttaacatttttaactttaaggattgtaattatagctaacgatttaaaacatttttcaccttaaaacaaaagataatctcattctttagtcttatttcccattcaaaaaccattcataataaatatctcaaatagcgattagtttatttgtggaagtgatttgatgtagttatcgttggttattttaatatgttatttgattcctcggttttggaggattctaaaatgtttataatagcctataaaagataaatagttataatttttattccccatccatgattctatgtttaaaaatattagtagaataatttaattattgaatttttacaatattgtttttttaatccttttttgttcgaatatcgaggtttaaaatatcttacaaatatctaatttttggtttttatttaattattccacaatcctacacattagacaaacttagtcataaaattgaccatttgactttaaaatctcaattttaaaactatcaactaccttctaaatctaataatgttgtaaaaattaaagaagttatatgtgtatgtatgtatagactgaaaaattaatagttttaatgcaattttgcattgttaaatattactacattaaaattagtttgagtatttggtaaccatctcttcgatgatgttcgaaatagaatcatttttggatacgtctgaaacactgcaagtccttataagtctgccttgatgcattacccatacggatgtacaagatttgagaaccttagagaagtgtgcagtaacgaaacaggtgcagtgcttaaagtatttatccagtaattcgtaaattggtacgcccatatcttgagcctccaactcatcctcagaaatgttatcagacggtggttcatcaatgattaacattctgtactgatgtctgcacaatactaacttcgcaaaccaaagtgttctgagctgacttacagataacattgtacctgctgacctaaggtcatccatggtcattgccctttcttcagggtaaggttccttacctttgttaaacgactcttttggtgattgttcaaaaaagtttttagccatgttaagtggtttgggaacaattacagtatcgagtcttcttccacctggaaggctatttacaaaatcaagaagaccgcaattttcaagagcctcgttgatcttctcatcagtgaatagtcttcttggatccaagaaccttcggacagtccagcccttgaaaacaaatggtaactgaggaagaacgccaacaatgtgtctcacgacacttttgggaatttcttgtaaatctctaccatccaacaggacttgacctgttctatttctaacattgttttctagcacagatagaagagttgtcttaccagcacctgttctgccaatgattccaatgatatcagatttgccgggtgttgcgttgatgttgttaaggatgaggccttctttattcatcagtgaattggtgtaaacacataaatccttcaacacaaggccagtgtgttcagatgggagatatttcgaaacgtacatgaagttgaactttggcttatacgccatcctctttaagaagttgggattggtgtctttgaattcaattgcccttctcctaagcaagttagctgtattaacttggtcctcaggttttgatgaactgataactagatcctcttcatgaacattgcggaatttgtcaaaaacacacttggtacctggaggaataaagcactggaaccttcgaagtgaacatataaaaacctgcagcctggcaaaacaaaacgaacaattgttgaaagatttaataacgctgcttccaagtgataaacctaatccaaagtatccaacattcatcttaaagtcagtaaacttgtcaaatatgatcagacctgtgaggaacagagcggttgtaagtgaaaataaccaattgaagagaactgaagtccaacttcccaaggaagttgccaggaaccaacacctcattttataatctgttctttcgataagatcattaaccaactcccattcctttttaaagcttctgtgaattgctgctcctaatatggcatcctcgcatgtcttgttaacatgtgacatagtttctagtgatcccagttgaatggtcttaaatgacttgacaatcttcaacactacgaattcaaaggcaatgaccagtgatacggcaataaatggaacagaaaggggaattgtgtaaaatagagttccaatggaaatggctgtttgaatgaatgccaagaaagtggtaaagatcatatcaccaatatattggtcgatgaatagcatatctgaagaaaaatatgttatgatttggtttatctgctttttgatcttaatcactgatgagctgttcttgaagactgaggtgagacaatattcatgtattctttttgaggccattagagtggaaaccgtgaaaaataatatcgatattagggaacaacccataataactgacacaataatcagcattacgttgagggcagaatcgctgtgtgatacaacatcggacatgtcaacagtgacgccatcgtcataatcgcctatttttttgaacatataatctgtgaggttggttgcaagaacaaacttggaattatccataatacttgatgctagagaaaagatcgtgaacagaacaaatgcaaatcctgccgctttaaaatacagtagatatgggttaaatttatcgtcgggataacattcctggattatagatgataatgaacgtctgtacttcgatttggtgaggtaattcctggataaactattgtttgagcttgaataacatagtttcatcatatccttggtaaagaaattcaacttatatggacctgaaggaggtgtgatatactcaaaggcattttgtgtcttcttgtctttaaaaatgtctgacaaataacagttgaaatgaacagatttgttatcaatctcgtatacgggaattctggggaacttaaccaagtctgaagctctgacacatttatccagcaaggttagtgatgaagaaactataaccgcaagatcgtccctaactagtagaccattcttagcattgaacaggttgaagaatacagttcttgatacgtagggatctaacccatgaaactgtgaatccagacacattaggaatgaacactggtttctattgtaatccttgttcactttactgaatatgaggtaggcatagatagcgcgagccatttccattctaactctctgaccacaactgagtgagtgagcattatctgatacaactctcaagtcacctttctcccatgataatatatcagtttcaagttcaagtgctttgataactgattcataaatgtcctcatcaaatctatggccgaatgttatgtttgatctaatagttccttctttgagccaaattccttcagatgcgtaaaatattggcattgatgtgtgtagaggaactactgccattgaacctccaaccaaagtcatctcaccaagagctgactttattaagttagattttccacaaccttgtgtccctgtcattatgacaatttcgcccctcttaagttgaaagttaacattcttcatctgaacttcattgctcttactggcaaaatccttcttactgtggacccatgcaaatgaggcatccttatataacattacaacatccttagcaagctcattggttacatcaggtaggtcagatgacatctgtgttgatccaggaaatcggttgtcacttacgtaaaagttaggtgaacattcgttcagatattttttaactctgttgtatgatatgtaagcagttgccagtcttccaagtgcataaggaagcatgaacattgagttgataatcctgaaaaatacgtaaaatgatgataagaatcctccaacctcaacgtccttaataacctccgcgtctctaactgattttacaaaataattcatcaagacaaagaatgtcacattgttgcaaataacaaacaacgacttattgatcagcgtcaagaagaacctaaccaaaatcaacaataactcagaattcctagtctcagtaatgatgttgatagcaatgtcatcgtagagtaatttgttgatgagaggtaactcggatataatttcaacacattctcctatcctataatcctttacaaggcaaacaaagtggagtaaataagtgtttatgatttcaacaacgaccattaaaaagcagaagacaacgccaagcacgtataggacccacaagttaatcttaatctccatggaaatcaacacaacaccatagataaagtttgacaaaaagttgacaattggtactgcggattccaaaaacattgaaacgtaaaagcagtcattatattcaaacgtaaatatgataggagtaatttctttgttctgaaaacgcctggcgggacaatataatgggtttctggaacattctgaatcaggagaacagctgtgtaagacagtgttacagacatttagcatattagacccgtttacgttattattgaagaaacgtctgtgtgaaatgccattttggaatacgcatacagaaactgaatgttcccagacaagtcttaatcgattcagataaaaggtgaagttctcgattaaaagtccatcaacaatctgtaggcctattatagcaaataggaacagaaatattttcagaagagcaaacgacttggtgttcaaattttcaagtaaatgcttgaccagtagtgcaatgctcatactaaggacattagtaactataatacctaggagaccaaatgttgttctcttccaaaacgttaggaatagggctcttaatagaacagatctggtaggcttgacagttggatgtccatattgtcttgtttcatatgactctaatttaagtataccatcactaacattctttgagaaaatcgggtaccaatataggatttgatcgtcaacgggcaaggggtgtagtttgtatggttctacatattgtttagaaagaagaaaagcccatttaccaacccaatggaagaaaaggaatttcaaaacagtgacagagtcataatacctaaactttaaaaaacgggacttgtttttgaaataggatttggaatatgatttactttcccagtaatgatgttcggaaccaggtttttcaactgcatcttggaacttttcattaaataattctgaaatatctctagtttttcccattcaaatctgcgtatggatagaaataatataatttcaagtattgctgacctttttacttagaatattggaataagatgctctctaaacgataattatcaattaatttccttaaatgcgaataattattaaataaatgtcaaattagggatttgtgacaaatattaatggcaatgggaaggattgagtaaaacactgaccttattcaagtagtaaagtttgggattattctgagatgatgataatcatttgtactcggtatgttgaaatcagtgatacagtatgttgttaaatcttattttaaattctaaattccaaaagtgctattagtgtgatcttctgtcaagaaaagcaggtatgtgagagtgaaccttagaaaatcacaaagaacacaaatcgttagtatatgtgacacgacatgttgtcttcaaagagataaggatttagtgttaaaagagtttcccctaacaatcagacaaccccaaaatataagccccaataatttgaaggtgtaaggtaatggcttaaattattccaaaataatctacttgactatttaacacattttcataatttctgtgaccaattgttatttaattaaacttagtttaataaattcaatatgtatttgcacatcgaacgatatctgatagaatcttaaccatctgtacaaagtttgattaatttaatgaatcattcatcagattaacatttgcattgtatgtctgttattataactttaatttattatttattacatttttcaaaaaaccctcaaaaactaagataatgattgatattagataggatcctttattcagttaaatttagtatttttaaacaaattaaataatatattgataataatagttactttttaaaaactgtatataaaatgtaatatgacatagatagttcattgatacctttttaattctttactcgatggttaatattcaaattgtgtttaagttttaattgggtgattcatttaattatccttaacatttctataataacagtttcatataaatagttggatccacttgcaagtctccattaaatttaaattaccatttgatttttgagtttgcaactacatattaaaatcataaatattcaataggtttaatatacttggcttttgataattaaatataatacaatacttttggattaaactatgaaataatagtccagatttaatgtaccttagattccataatgattaaaacatgatcatccaattttaatccaataaaataagatttgcttaatttcaactcattgttctaatttaattacaaacactaattcaaatcaaattttaggtcaaaaataatcagagcattatgaaatcatgactaataattgtgaaaaaaatattttaagaagatctcgaattaattttttaacaaattgcaattttatatttgtgcaatagttcatataaaatagcactctaaatcggttctatataactatatagaatttataaacttaatatatatattaaattttattattttctaatatttatcaaaattatatttaacaataacttatagatatatgatctcggcataaggtcataataattttaaatacattttaaataattaaatagtttttattttaaagatataactgaaatactagctttatataagtaagatcttttgttaaagatatatattaaaagatctgttcctagatatatgtcaaaatatttaaaattatttttggtactcttgatgttgaatctgtcacaatgaagatttcattgttatcttttagatctattatatttaaatactctctggtatttattctagttgctcagataaggtattttacagattgtgcagatcatcctggagattccgagggagcggtaggtggagccataggagggatcggtgagatattaactaaacaaagatctgtcccaaaggtacatgatcttgatattggtgatcctagtaaaactgaattatatgttcattacaaagatggtaattatgaaacattttgtagtaaagcaggcaattcattcaaaaaaataataaaaacaaaaaaaaatgtacataaactaatttgggaagcaaaaaatgataaaaattgtgaattcgtcaggatattgaagcgtgaaaatgggtataagtatatgcttattatagttactggtggtagttttcgacttcttcgaaaacttcccaatggtaagacttggcaggatattacatatactagaaaaaatttctcaacgttcaaattttttttctttgatgatgggaagtttaaggaatttgaaccaagtagggaccttgtgtccgtatataaattcagtgtaggatatcaatttagaagtggaataaactgccataagattcaattgggtgataaggtgctttatgattatgaattggatcctgagttcggattgttaaagggagtatatctggatcttttaacgaatgattttaacattttaagtcgtaatgatataacaaaggaattaaatatagaaaaggctgagtcgattcaaacttctgttccagttcgttatagtaatttgccaagagaactaaaactaattggttatgaaccagtagatccgtttgatccatttaatccagataatttttctgaaatttgccataccaaatatactgtaacgagggctggactcgattacgaatatgacctaactagtgtaagatgtgttacaatcaagtgtggagatgatattatttggaataaacctcacgattcagatactcatccattgttcatgaaattacttaaggttgaaaaaaggatattacttaggttttcagatcactttgtttattttatacatattggtactgtatggagaccacaaaaatttctttacaaagaatccgaaggactaaaagaaattcatgaggctgttgctagtatcaccattaccgaagagcagttgaatgctctttctaagtgtaaaaaagttaatgttgacattacgaaatgtgaaaacgatactgagtttgatcgttcttttgatgacgaaaccggtaatggtatgcttgttgctagatttgggtttgtatttaatttaattgtatctggtaaagaaaaaatttgggaagccgataaaggagaatattgtaaaaaaataatggtacaaagttttgacaaaaaaaaatgtaaatacgtaacaatttttaatgttgatggtactattaaacactacaaaaaaattggagatcagtggaaaacggggggagattcactaatattctatatacaagaatcatcacctagctacacatacagttgtgagcgtgaaggtgaaactcttatattcactacaaaattaaactacagattttttatggtgaaagatgaagaagaaaagatatggcagtctagaaatagaaatgaaagtggaataaaaatcataacaaataataatccttctaaggaaagaactaatgttagtatatacctttctaatggaactattaaacattttgaaaaaagggaaaacacatgggtggcgatgtctaataaagcagtattggatctttcaattaagaaaaatgatttccatttcatttgtatagtcgaaggttcatgtaaatcgtattttccaaatcaaaactttaaaattaataaggtgattaagggaaatcttgacatatggacgactcaaccaaatgatcaagcggtaaaggcagtgctcaatggttctggcaaagaggagaaatatctatgcatactgttggagagtcgtaacttcgtactacttcacaagagtggtaagaatcaaccctgggaagatataacagatacaagacatgatttgagtcagttccaactttttaaatgggatggtacagagattaaaaacccttattatgaagtggaattgtcaaataccacatactcatacatttttaaggaaaataccaatattggttctattaaatatagaaatagagagatttggttctatggttcaggaagtggagttgaatatccacatagactaaatctggaattaactaaaaacaaactatcacttacatttgatttaaatatagaaagaaaattgcatgtaacttaatttcgaaacagcattccctcaagaagttaattcaagtcatccataataataacatgtagtataacatcataaattttgatagtatgttataatgtttatatgttaatttaactatttgacatataattggtttttttggtttgcaaatttagttaatgttgttaaaacgtttatatttttgataaatgatatatttattttatgattaatccaataagaataatatgttatagaaatactttataatatttaattaataaagttataaatttccagatcccccatctataaattttattaattatagaatgaataaatattttatgtacatatatacacttttattcataataattctttgtgttgattctgttgatgatttagataataatagtggaaatataccccaggagcatagtgttcaaactaatgctaatcaaactgatggagattcagtagtctctagaaatattatagaacgtggtctagggcatattgtatatggatcatatggatcagaatcaattaacacaacacaacaaagtgacactgatggatcagtagaacaaccaagtggatctgaagaaaatactaaacttgttggtacaggagatgatggtagtaaatctggatcagaacatgaagacgatgaagacgagcaagacaaggatgatgaggaagatgaggatgatgaggatgatgagaatttcgatgtaagagaggttagtggtgatgctgatgtagaatctggaaaagatgaacctataaagggaattcaaagtgcccttggagaaataaatccagaattagcttctactgaatttgtaggattagatgataaaggtaattcctttccaatggataatacacattattatgtaaccagcgaaagtttttccgaaattaaatttgaactggtttctaaattaatacaaataaaacataagaaaaaaacagtgtgggaccatgaaaaaggtgcaaagcatccagaatcgataatatataaaaaattatcagaaatttttattgtcatctttgaagatatttttatttcatgcaaatgtgttaatggaaattggaagataaaaaaaaatagagtaccacgagtcaggttattcaacgtgaattatacaaataaattgtgtcaaatagaaacgtcaatatataaaaccgaatattcagaatataatcaggttaaactatgtattggaaagaatttaatgtgtacaatgattaaagttgaagaacaagtactttgggaaaaaaaatataatgaaagatatccaatttttgttatttgtcacggtgataaaaaaatatcagtagcctttaaaagagtaacatatatttatatatgtcaaaatggtatctggatttttgaaaaaagtgtaaagatacgaaggcgatagtcattttataatcttaactactataactgtattataaattactttaaattttaaaaataataattcaacacatactagttttaaacgaaattaatatgaatctcatcaatatttatgaaatgttcagaggtaaaatcatttatttaaaaatattattaaattttatataaaaattttttagtaaatttaataataaaatttaaaaataggtcaattctaaaaaataagaaattaatgtctgaaagtaagaatctgaagtaaaaaacagatttttattacaactttttaaaaaataataatttaaatgttttattttaatttaatattatttaaagatcccccattgaatgatagtgtatcagtcaaataatgaataaacatgtaacttacacatatgtgctaatacacatactaattggatatgcaatatgtgcagataagctaaacaaattacagcctgatgttactaacgatgatgacgatattgatggtgaaaattatgatttagtggtaaaagaactagaaacactacttgacgatggagaagattatgattcgaaaaaaatatcaaaagaagtagaagaaatatttgatgaagatgatgagtcgtctgatgatagttctgatgagattgtaagagaaatacaaaaaataattgaagataatatcgatgaaccttcaagtgcattagaacaagattcacgtaatctaagtccgtcacgatcacctttcaattttaccagttatcaaccaacaattactgctgtcacagtacaatctagtgatgcaccagtatctagttctgaaccccaggtagttcaacaacaatcaccacaattgtttatacctataataccaacaccaactaattttattcatccacaactttatcgaccaccatactcgcctcgattgcctactaattttatgcctaatatttcaagtggtccgtatggattacaaattttacctagatatcctcctccatttacttggagtcctagatatttaataccaagttaccaaaaatacccttatcaacaacatgctggaggaacaggagttagtgataaaccatctcaacctagtgaacctactgaatcacaaactcaacctcaaacttctgataagccaaccgaaccaagtggtacagatcagcagttacaacctgaacatattcaagttgaagtgggatctgatgatgaagaacctgaagaaggtgcagttggaggagctggaggtggtgatgaagaggaaaaagatggaaaaagacggaaaaaaagagtagaaaaattatcaacctttttaccagaagttagaaaatgtgataaaataacttttatgaaaaagactgatactgaaggattgattaaaatgatatggaaagatttttatgtatcagggtgtggtttgaatataactaaatattcatttatagctgatcttgaacaattgatatgtgatgatgaagttatttatgagcgtaaacctggaaaaccttattatagatcagtgtgttataataatcaattaggttcttttgtttttgaatcaaaaggtggtttattattattaaggtatacgaaaggtaagtggaaaccgaataaatataagcaccgatgtccttttaaattatttaccacttccgatggtgatggtaattctgttgaactgactcatgatgattattgtgttgatgtaggtacgaatggaacaatcagatatagattttgtaatagtattaaatgtactaaggttatgcttggagaagaattagtttgggagaaaggtgttaatgaagaacaccccttgggactatgtacttcttataatgggaaagttgttctttattttgatggatataacaccatttttgggaaaaggtataagaaatatgcagtattaagtagtgggaaggaaggaaaataaatttcattaaatccaaataaggttttaaaatttacatataataattattttaatatattgtatctatctgataaatattatttgttatttttatacaaattattcacaatttgacttgatctataaattttattaaagtaatgtattaaatactaattttagatgaaaaagctaatgtatttaaaccatcttaactactttaaaaaggaaattttcaagaacaagttgtaaaattaaaaattaaaattatcaaataatgacacacggtacattttaagaaaataattttaaacaactaaagaattagttattaaaataatataactttgaaaagatataaaatatataatgattaaatatatagatcccccatgggatactattggattattgatataatgaatttatgtgtgttatacacatatctaatattattcgtaataattggatatatacattctgctgataaatatccttatcaggcaagtggaaatgatggaaatgatggaaatggtgaaagtgatggtgatgaagaagaaaactttgatgtaatagtaagaggaatcgaaaatatacttgaagaacaagataattatgataacatagaaactaatatagaatcaatacttgaagatgatggtctacaatcggaatcacaacccataccaatacatccgcaaccaatattacaacctcaaactttaacgcagcctgttaactattatgggcctcctcctcaacctcaacccataatacagcctcaacctctaccgatacatcctcaacctctaccgatacacccgatacatttgacacaacctgtagtacaacaaatagggcaatatcctcattattacccaattcaacaatcaatacctcgacctatagttcctccatatcatccgtatggaccacctcagagtgtgccgatacccgttggacaaattcgtttaccagttcctacaattcaacatccaccaagtatattattacctattttaccaagaattgccactagccctggatttagaccaatggggttaggtcaattacagcctaatgtaattcatcctggaccattaacgcaatttccaactccacacggattgcagccgggtgcttttattcaaccagttggaccagttgttccacaagtagaagatcaacagacagtacaacaaactatcgaatcagtccaacccgatcaaagtgatcaaccaagtcatgattcaattggacatgttgcagaaggtggcttggacaaagataaagaatgtaaagaaataaaattaatgaaaatggatcctaaaggaaatttggttacgattgaatatccagaatatagaattttatggaaagatgaaaatacaacaaaaatgacagtaaattgttttctcgaggaaatacattgtgatgataagtgtatttggaaacataaggaaggaaaacctcgtcctaaaaaaataacacataacattaaagataacactattactattatttgtagaggtgtatgtattctagttaaaaatgttagtggtacgtgggaagagattgaaagaagactcccaaaaaaaattacattttatacaacagatgaacaagggaaccttgataaactaccagaatactatcataaagttgatgtatcttcatcgggatctattaagtatattcttggtccatcttcaagatgttctagaattgattgggaagataaaaaattatgggaaagagctgatgatgaaacgtatcctcaagtcgtatgttttgatctaagcatgaatcttattatttactttgatacttttgttcgagtttatggaaataaaaggggtaggtacagacaaatatttactaaaaaaaatgtaagagggttcgaagattaaaattaataaaatttggttttaattataattaatataattttatcatacacgtgtcttaaaaacttattttactatttatagtgtttaaatttaaaacaatacattaaataaatattaaattatatagctattttacactttaatttctattgtatactaattttattacttatgagaataatatacaattatgaatgaatgaaaataaatatatcactgttagttttgtacgtttcgaaattttaacgtattgtaaatttttagatcccccatggaatagaacattgtaaatgacataatgaatatatgtgtatggcacagatctttactaatactcatactgataaaatacgtgaaatgtgctgataagcctacggaacaacctcccgttagtagtgaaagtgacagcgatgaagatgataattttgatgtaatagtaaaaggagtccaagaacttcttgaagatgatgatgataaaactgctggagaatcattagtttctgataatgtgattcaacatggacttggacctctcatgggtcaaggatatacaccaccaacatatacaccccagccacgccaaccatatccacaacctgtacaacagtatgtacctggaccaactcaacatcaacaattaccaagggcaattcattatgaacaaattagagtacctagaccacctattttcggaaacagagttccaatatatcaaccaagaccaccaataaatatacttagaccaatattagctccaccacccatactaccctcatcaggtccaaaatcacaaccaggtatattaggtccagcgccaggaccactaaaacatcctacacagatacttagtgattataatgaactgctggataaattacgtgaaattgaattgagtttagaaataacaaaagataaagatttagaattgattaaattgtttaaaaatgatggtgaaggaaatttggttgaaatgtctggaaaagactattgtataagattcaggaatgcacataaaattaaaattctattcagatctgaacttgaaaaggtggtttttaaggatgacactatttatactcatttacctggaaaaccgtattgcacagaaatgacctataacaaaaataattctgtttttgtttttaatcgtaaaggtggatttctctatgctgaaagccgtgaaaatcagtggagaataaaatttagaaattttccagaatttgttcaaatttatgctcaagatcatgaaaatagacagtttcaacttactgaaggacactactatctcgatctcacttcaaagggatcttacaaattttcatttataccaggtgtaaagtgtactaaaattgtgattaatggctctgttgtttggaaaaaaacatatgctgaattttatccaataatagtaactgttaccaaaagattgaatgtaattcttcattttaaagattattttactgttttcggatattttaaaggaaattttaggaaaatattcaccaaacaaaacatagaagacatcgatgattggtagaccaattattatatttattatagtccttttaatttaatttatataatttatttatatattattaatatcatttttcactttgaaaacgtgattttaaattaaaaaaaataataatagttattatttttaaaaaattatttatatatttaaaaaaagccaatctaatttataattgattctatattaaataataattataagctataccatgaataaaacaaactatttattttaagatcccccatgcagtaaagctggatcaattgtataatgaacaaaaatattgtgtataattttatattaatatttataataataaaatgtgtcaaatcacaagacaatgatcctgatcaaccatctgaagatgatgatgaagaagatgagtataattttgaagtttcagatgtagatgaaataattgaggaagaaactggtggacttatcaatcctcaataccaaccacaatatcaacaaatagaagaatctcaatatccaacccaaccacagactcagccccaacaatatccaggatatctaccagaatcacaaggatatcaacctgaatatcagtattatccaggatatcagcaacaacagcaacaatatcaaactgatacttatgggtattatcaacctccagcacctactcaacaagtaccacaacaactggatcagtactatgatcaatatgaatcaacacctcaggtacctcaacatccagatcagtattatcagcattatggacccactacgcctattcaaccgagtcaacctcaacctcaaccacaaccacaacaacaaccaagttatcagtattacgatccttataatcctactcaacctcaacaaccagaacagtatcatgaacctagtcatcctccacagcaaccatcctatcaatattacgaaccacctcaacctactcagcaaccaagttatcagcattatgaacctagtcatcctactcaaccacaatcaacttatcagtattatcaacctactacggctccaccgcctcagccacaagtaccacaaccacagtatcagtattatttaccaccaccaactcaaccacaaactacagatgatgatgaaaatttttatgtgacagaacatgatcaagtacatcaagtgccttctacaggtgatcctgagtttatatatggaccaagtcaaccgccaacacaatatcccattccacctcaacaaactattggtgaaagtactgaacaaccaattaaaccgcgaaaaagagcaacaaagagaaaagatcctcgaacgccagaaaaacaaggtgatgaacaaccgattaagctaaaaaagcctaggtatattaaaaaaactaaacatatcaacttttataaaagaggtcatctgggaatgcttgtagaaatgaatgagagtgactataatgttacacatagtgatgaagataagacaaaatatctattcaatgcaaatcttgagcagatagaatctgatggtgaggtagtctacgagcatttatacggaattccatattgttcatcattaactcacagtaaaagaacaaacgttattatcattactaatattcaagggtttatattaattaaaaaaactaaagggttatgggaaaggactgatgctaatatcccagattacgtaacattgtttagtgaggattctgatggtgaactgatgtttttgagtaaagagcattacaatataattttcacttcaaatgcatcctttagatacgaaatgttgccaggtgtagaatgccataaaatagttgttgacggtctagtggcatgggagaaaactgaagaggatgaaggtttccctctagttttttatgttacaccaaaattaactgttaaagttaactttgaaggatatttcaaagtgtttgaaaggagaggtagcaaatatactcgcttgttcactaagtctagtgtcggaggatctaaatatcactaaattgattttaacacatacaatatgttattgtataaagtatttttaatttgttgaaacatgttaaatatttttaagttatcaggttatattaaacatttaaatgaatgttttattaatttattaaaatttattatatttttaatttatattatgttatattatgtattatatactttgaatatttttgagatcccccatggaccaaagctatattaatagtataatgaataagcatattgtttataatttcgtattaatatttataataatccaatgtgttgaatctcaagacaacaatcctgatcaacctgctgatgatgaagaagatgaagataactttgatgttttagatctagaacaaatcattcagcaacgacttagtcgttttgatgaccctcaataccaaccacaatatcaacaattacaagaatctcaatatccaacccaaccagagactcaaccccaacattatgattattaccaacctgaattacaaggatatcattcagaattatcatattatcaaccccaacatcagtattacccaggatatcaacctgaatcacaaggatatcaacctgaatatcagtactatcaacctcaaccatatggtcaataccaaccatacgaaatccagattcaaactcaagaaccaataccatattatgtaccaccacagcaaccaggtcaatattatatacctccagtaactcaacctactcaacaaccaagttatcaaaattactaccctgggtatcctccacatcaaccatcctatcaacatcagcattacgaacctccagtaactcaacctgctcaacaacaacagtattatcaacctagtcaacctactcagactcagcctcaactaccacagccacagtatgagtattatgaacctagtcatcctagtcatactactcaacctcagcatcaatattatgaacctccacaaacataccaaccacaacagtattatcaacctactacggctccaccgcctcagccacaattaccacaacaacagtatgagtattatcaacctactacggctccacaaacatcgcaaccagaacagcaacattattatgaacctactactactcaaactcaacaaccagaacagtattatgatcctagtcatcctacccaacaacaacattattatgaacctccccatactcaaacagaagtgattcagtcagagcctcagtcaccccaaactcaatcagaaactgtggaagacgatgataatttctatgtgacagaacatgatcaaccccaacattatgtgcctccacatactcaagtaactaaagctaaacaaccaactggaacacaagctgaagttatacaagttcaacagattgatgatgaggaaaaagagaagaagagacaacaaagagccaagttgttggaaaaattaaaaagaaaaatacaacgtccggataaaacaaagccatcaaaacaacaaactgcccaaccaagaaaaagaaaaagacctcaaactacaagtggagaccaaggtgaggaggaggaagatgaagaagaacctattgaaatacaatcaattgttccaattagaaaatctagtgtaatcaaactttttaaaaaggattcttcagaaaatcttgtagaaatgactgataaagattatgttataacatttgatgattcacataaaagaaaatataaattcaaagcatatcttgagcaaatagaatgtaacaatgaggttatctacgtacatacaagtggaacaccaccttattgtttttcattaactcatagtaagaaaacacatataattataattaccaagagtcaaggatttacattagtaaggaaagtcaacggagaatggacaagaactgatgctaatattccagattatgtcaaattctacaaacgggattctggagggaatgaagttttaataaccaataatgaatataatattgattttacttcacttcgatcctttagatacacattcctcccagggacaagatgtcataaagtacaagttaagggcgtgattgcgtggaagaaaactgaagatgatgataattttcctgaaataatttacgttacaccaaaattcggtgttatacttaagtttaagaaatatactaaagtcttcgaaaaaaggggtaacacgtatcaatatttacgcactaataaaaatttaataaaagccaaatatagataaattaattttaacacatacaatgttatagtgttatggttatactaattatagtttgttgaatatctcatcacaagactacactaaagattaagatcattaaacatttaaatgattgacctattaatttattttaaaatctgctgatatatcaatctataataatctatattatattgtattatataccttgaataatttcatgatcccccatggatcaaagctatattaatagtataatgaacaagcatattgcgtataattttgtattaatacttataataatccaatgtgtcaaatcacaagacaatgatcctgatcagcctgacgaagaagatgaagataattttgaagttttagatctggataaaataattgaacaacgaattagtcgttttgaagatcctcgatatcaacattatgattattaccaacctgaattacaagaatatccaacccaaccagagactcaacccgaacaacatgatctttaccaatcttatgatcagtaccaacctgaatcacaagaatatcaacctggagatcagtattatccaggataccagcaagaacatcaacaatgtcaaccagaatatcagtattatccaggatatcaaccagaacatcaacaatatcaacctgaacaatatggtcaataccaaccatacgaaactcagatacaaactcaagaacaacaatattatgtgccgccaactacgcaaccagcaactcaggcacctcaagtaacccaggaatctcaaacaataattcattccactcaaccaacttatcaacaacattatggattttatcaacctgtacagcaaactgaacagttagagcctgaagttatacaagttcaacagattgatgatgaggaaaaagagaaagagagacagccgagagctcaattgttggaaaaattaaaacaaaaaatacaacgtcctcaatcgtctcaaccaggaaaaagaacaagacctcaaactacaagtggagatcaagatgaggaggaggaagatgaagaagaacttgttaaagtacatccccttatttcacctaaaaaatctatacatatcaaattcttcaaaagggattctgatggaaatcttgtagaaatgacttattgtgactatgtcattatatatggtgatccaaataaaacagaatatatgtttattgtagatcttgagcaaatagaatgtgacgatcgaattatttatcaacatatagatggaacaccgtattgtgtgtcattaattcatagtaaaaaaacgaatgtttttgtcatgacaaacagtgatggatttacattagttaaaaaaattagaggaaaatggacaacaactcaagaagcaattccagattttgtcaaaatgttcacaaaaaatgaggagggcaaactaatttatttgaccaaagaaaaatatactgttacttttacttcaaatggatcctttagatacacattaatcccaggtgtaaaatgtcataaaatagtagttaaatggctaactgtatgggagaaaactgataaagacgaggaatttcctgtatttttttatgttactaataaatttcgtgtattccttaactttgaaaaatatactaaaatctttgtaatcagtaataatagatatcgactgtcacgcactagaaaaaattacacaaaagccaaatattcctaaattatttcaacacatacaatgttattgtaaaagtatttttgatgtgttgagactggttaattatttttaagtttttgagatatattaaaattttaaattttaaattaacaaatttatttaaatttattatgttattaatataaaataatataatatcacattgtattacatactttgaatattttcaagatcccccatggatcagagctatattaatagtataatgaacaagcatattgcttataattttgtgttaatatttataataataaaatgtgttgaatctcaagacaataatcctgatcaaccatctgaagaagaagaagagtataattttgatgttttagatctggataaaatcattcaggaccgaattagtcgttttgatgatcctcaatatcaacattatgattattaccaacctgaattacaaggacatccaccccaacctcagactcaaccccaacaacatccaggatatcaacctgaatcacaaggatatcaaccacaaactcagccccaaccagaatatcagtattatcaacccgaacaatatgatttttatcaacctgagacattacaatatcaacctgaatcatatggttatgaacctgaacaatttgatcaatatcaacaagaagcatatgggtattatgaacctccaactactcaacctagtcaacaaccacaacagtattatcaatctactactactcaaccttatcaacaaccaagttatccgtattacggacctccagtaccacctcaaccacaaccagcccaaccaagttatccgtattatttaccacctcctactcaaccaacttatcaacaacaaccacagtatcagtattatcaacctactactactcaaacacctactcaaccagaagtaactcattcacctcaacctcaatcagaaactgtagaagacgatgatgatttctatgtgacagaacatgatcaacaaatacaggaacctgtacctgtacctgaaactggtcatgaaactactcaacagtcaattaagccacaaaaggaaccaagaaaaagagcaacaaagagaaaagatcctcgaacgccagaaaaacaagatgaggaagaacctgttaagctaaaaaagcctaggcaaattaaaaaatctaaaaaacccaagttctataagagaaattatctgggaaagctggaagaaatgactgaagaagactatgtcgttatatttagtgataaaaagaaaaaagaatatgtattcaatacatatcttgagcagatagaatttgacaatgagcttatctacgaacatataaacggaacatcttattgttcattattaagtcagactaaagaaactgatgtttttatcctgaccaacagtgatggatttacattagttaaaagaattaaagggatatggacaacaactgatcatgtaactccgtactatgttaaattattcacacaagacgacgaaggcaatgaagttttaataactagtgatcaatatattattgatctcaattcgtttgggtcctttacatacaagttccatctaggtgtaaaatgctataaaatagtagttaaggaaataactgcatgggaaaaaactgatgaggatgatgagattcctgtgtttataaatgtatcatcagaattaaatgttatggttaaatttaataaatatactaagatgttcgaaagaaggactaagcactataaagtcaaagataatagactaaatttcagaaaacctaaataggactaaattaattttaaaacacacaatgttattgtataatatagtttcaatgtgttaaatattttggatatttttaagtttttgagatatattaaaattttaaattttaaattaataaatttatttaaatttattatattattaattgataataatctatattatattacattatacatctgaatatttttgagatcccccatggaaaatattttataaagctctaataacatgagatgtatgacatacaaatgtgtgttaatatttataataatcaaatgtgtcaaatctcaagacaataaccctgatcaacctgatgatgaagaagaagaagataattttgaagttttagatctagataaaatcattcaggaccgaattagccgttttgaggatcctcaatatcaaccacaatatcaacaattacaagaatctcaatatccaacccaacctcagactcaaccccaacaatatgattattatcaaggagaatcacaagaattatcagtatatcaaccccagtattatcaatctcaatcattacaatatcaaccacaatctcattccgaacaatatgatcaatatcaaggagaatcattacaatatcaaccacaaactcattccgaacaatatgatcaatatcaaggagaatcattacaatatcaaccacaaactcattccgaacaatatgatcaatatcaaggagaatcattctattatcagcctgaattacaacaatatcaaccacagcaagtacaatatgggcaatatgtgtcttatcatcctactacggctccacaaacatcgcaacctacccaacaatcagaacaatattatcaacctagtcagccttatcaacctcagcaaccatctataccagaattaactcaaccaagttatcagaattatgaagttagtcaagttatccaacaatcagaacagtattatcaacccagtcaacctcaacaacctcagcaaccagatcagtattacgatccttatcatcctactcaacaacaacaaagttatcagtattatttatcaccatcggcacctcaacctcagcatcaatattatgaagttagtcaacctactcaacaacaacaatattacgaacctccacaacctgcccaaccaagttatcaatattatttacctccaccacctcaatcacccactcaaccacagtatcagtattatttatcaccaccacagcaacaacctcaaccagtaactcagtcacctcaacctcaatcagaaactgtagaagacgatgataatttctatgtgacagaacatgatcaaccacaacaggaaccttctgtaactgatactgggtttatatatggaccaactcaacctgctactcaacctgctataccacctacacaatatttaacgccacctcaagaacatgtagctgaagaacctactcaacagtcaattcagccacaaaagaaaccaggaaaaagaaaaagaactcgagctacaagtggagaggaagatgaggaggaggaagaagaacctgttaagctaaaaaagcctagaccaattaaaaaatctaaaaacatcaacttctataaaagaaactatctgggaaatctggaagaaatggacgagggtgagtatgttgttatatatggcgataaaaagaaaaaagattatgaattcaatacaaatcttgagcagctagaatttaacaatgaggttatctacgaacatataaatggaacatcttattgttcattattaagtcacagtaaagaaactgatgtttttatcctgaccaacagtgatggatttacattagttaagaaaagtagtgggatatggacaagaactgatcatgttattccaaattacgttaaactattcacacaagattctggagggaatgaaatcctattaactgaaggagattatgatattgattttacttcaagtggatcctttagatatatattaggcccaggtgtaaaatgctgtaaaatagtagctgagggtctgactgtatgggagaagaccgaaaaagatgatggttatcccataatgatttatttatcaataaaacgtataattattgttaagtttgaaaaatatagtaaaacgttccgtaaaagggttaagaaatttatacttttatacactagaaaattttgcaaaaagacataaatacaaataaattaattttaacagatacaatatgttattgtaaaagtagttccgtgtgttgaatatgtcaagtatttttaaattttcaggatatgtaaagattttatatattaattaatgaatatattaaaaataatcttatattgttaatttataataatcttatattacattgtattacatactttgaatattttcaagatcccccatggactaaagctggatcaattgtataatgaacagaaatattgtgtataattttatattaatatttataataatccaatgtgttaaatctcaagacaatgatcctgatcaaccaccagaagaagaagaagatgacaactttgaagtttcagatctagatgaaataattgaggaagaaactgctggatttatcaatcctcaataccaaccagaatatcaacaattacaagaatctcaatatccaacccaacctcaaactcaaccccaacaacatgatttttatcaatcttatgatcaaattcaaccccaacattatccagagtatcaaccagaacaatttggtcaatatcaacctcaacaatatggaccgtaccagacacctcaatttcagactcatcatatagcgcaacaaccatatgatcatcaagattatgtaccgccaactagtcaacaagcacctattcaaacagtaactcaacaaccacaacagcattatgtaccttcagcacctcaaactcaaacactgactcaaacccaatcatatgatcaatatcaaccgtatgtacccgtaactcaatttcaaatatctgaagaacaacaaatatctcaacaacctcaaacaacccaggaacctcaatatcagtattacttaccggaatcccaagatcaatatggatatcaaccgcaatatgaaacacaatctctttatgatactggtcaacaacaaataactcgccaaccagatcagtattatgatcaatatgaatcaacacctcaggtacctcaacaacaatattacgaaccacctcaacctcaaccaactcaacaaccacagtatcagtattacggacctcctacgctttatcaacccactcaaccacagtatgagtattatataccaccaactactcaacctcaacaatcagaaactctggaagaggatgatttctatatgacagaacatgatcaaccaatacaggaacctgaaacggtacctgaaactgaagctgaaccacaaactcaatcagaaacggtggaagaggatgataatttttatgtgacagagcaagatcaacaagtacaaccccaacaaactcaaaaaaaaagaaaggaaaaaagagaaaacaaaaccaatatcagaacaaaccaaaccgactcaacaacctcaaaaaaaagaaagaaaaagaaaacgtattggtgctccaggtgaagaacaatcagaaaaaccaagtggatcagaaggtgatcaaaaagtacctagaagaaggagaagaagacctatgaaacgtaaagtatataacgaaataaaattttttaaaattgattcaaaaggaaaactcgtagaaatgactggtcgtgactatgatgttacatttgatgatcgtgataaaacaaaatacaaatttatttcaaatcttgagcaaatagtaagtgatggtgaaattatttataagcatttttacggaatgccatattgttcattactaaatcacagtaaaaaaactaacattcatatactgacagatagtggtggatttacattagttaaaaaaactgatggatcatggacaacaactgatgcggtgattccagattttgtcaaaatgttcacaaaagattctttaggcaatgaaattataataaatagtgatcaatatactgttacttttacatcaagcggatcttttagatacacattcctcccaggcgtaaaatgctatgtaatagtagttgctggcctagttgcatgggagaaaaatgaggaagatgaggagggttttcccttattcttttatattacacaacaattgcgtgtattgcttaactttgaaaattattttataatcattgaaaggaggaggaaaaaatatcaatacatccgcactaaatttacttccggtagatctaaatacaaataaattaattttaaagcatacaatgttattgcataaatagtttcgtgtgttggaactattaacaattttaaagttttcaggatatattaaacatttaaatgaatgatttattaatttaataaaatttattatatatcaattgataataattttatgttatcatgtattatacaccttaaatatttttaagatcccccatggagtaaagctggatcaattgtataatgaacagaaatattgtgtataattttatattaatatttataataataaaatgtgtcaaatcacaagacaataatcctgatcaaccagctgaagatgatgaaaatgatgaagaagagtataattttgaagttttagatctagaacaaatcattcaggaagaaactggtgttcagatcaatcctcaataccaaccacaatatcaacaaatacaagaatctcaatatccaacccaacctcagactcaaccccaacaatatccaggatatcaacctgaatcacaaggatatcaaccagaattattaggatatgattcagagcagcagtattatcaagaatatcagccagaatcattagattatcaacagcaacaatatggaccagaaccatcagaacatcaaacggatacttatgggtattatgaacctcagcacctactcaacaagtaccacaacaaccagaacagtattatgatcaatatcaacaatatgcatacgtaactcaacctcaggtaactcaacaaccagaacagtattatgaacctcctactactcaaacagtgactcaaccaagttatcagtattacggacctccagcacttactcaatcaccgactcaactggatcagtattatataacaccatcaccacctcaacctgaacaatttggtcaatatcaaccttacgaaccacctcaaactcaacatccagatcagtattatgaacctagccatactactcaatcaccgactcaacctcagcatcaatattatgaacctccacaacctactcaaccaaattatcagtattatttatcacctccacagcaaccacctcaacaacctcaacaacctcaaccaacttatcagtattatgaagttagtcaacctactcaaccacagcaacaatattacgaacctccacaaacatctcaaccagaacagtatgagtattatgaagttagtcaacttactcaacctcagcatcaatattatgaacctcctcaaacataccaacctcaacccactcaacaacaacatccagaaaattactatataccacaattaccacatcccgctcaacaaccacagtatgagtattatgaacctcctactactcaaacatcaccactacctcaagtaccagaacaactggatcagtattatttaccaccacagcaacaaccagaacagtattacgatccttatcaacctaaccaacctactcaacaaccacagtatcagtattatcaacctactactactcaaacacccactcaacctcaatcagaaactctggaagacgatgataatttctatgtgacagaacatgatcaaccacaacgggaaccttctgtaactgagactgggtttacatatggacaaactcaacctacacaagaacctatacattatgtaccaccaaccactcaagaacatgtagctgaagagcctacacaaccaggaaaaagaaaaagaactctatctacaagtggagaggaagatgaggaggaagaggaagaagaacgaatacctaaaaaaggaagtggtaggccggttataaaatctaaaaaactcaagttctataaaagagacggtgatgaaaatctggaagaaatgacttattgtgactatgtcattatatatggtgatccaaataaaacagaatatatgtttattgtagatcttgagcaaatagaatgtgacgatcgaattatttatcagcatacacatggaacaccatattgttcattattaagtcatagtaaaaaaacgaatgtttttgtcatgacaaacagtgatggatttacattagttaggaaaactaaaggagaatggaaaaaaaatgattataaaattccagaaaatataatactattcacacaagattttttaggtaatgaaattataataactggtgatcaatatagtattcattttacatcactcggatcctttaaatatgtattgctcccaggcgtaaagtgctgtaaaatagtagttgatggtctgatggtatgggaaaaaactgatgatgatgtaggttttcctacaattatttatttatcagaacaattgactgttacaattaagtttgaaaaatatagtaaaacgttccgtaagaggcctaagtactataaactcctacacattaaaaaaacttcaggaaaagatagatatagctaaattaatttcaacacatacaatgttattgtataatatagtttcaatgtgttgaacatattaactattttagaagatttcaggatatattaaaattttaaattttaaattaacaaatttattaaaatttattatatttttaatttatattatgttatattatgtattacatactttgaatatttttaaaatcccccatggatcaaattttataaagctctaataacatgagatgtatgacatacaaatgtgtgttaatatttataataataaaatgtgttgaatctcaagacaataatcctgatcaaccatctgaagaagaagaagagtataattttgatgttttagatctggataaaatcattcaggaccgaattagtcgttttgatgatcctcaatatcaacattatgattattaccaacctgaattacaaggacatccaccccaacctcagactcaaccccaacaacatccaggatatcaacctgaatcacaaggatatcaaccacaaactcagccccaaccagaatatcagtattatcaacccgaacaatatgatttttatcaacctgagacattacaatatcaacctgaatcatatggttatgaacctgaacaatttgatcaatatcaacaagaagcatatgggtattatgaacctccaactactcaacctagtcaacaaccacaacagtattatcaatctactactactcaaccttatcaacaaccaagttatccgtattacggacctccagtaccacctcaaccacaaccagcccaaccaagttatccgtattatttaccacctcctactcaaccaacttatcaacaacaaccacagtatcagtattatcaacctactactactcaaacacctactcaaccagaagtaactcattcacctcaacctcaatcagaaactgtagaagacgatgatgatttctatgtgacagaacatgatcaacaaatacaggaacctgtacctgtacctgaaactggtcatgaaactactcaacagtcaattaagccacaaaaggaaccaagaaaaagagcaacaaagagaaaagatcctcgaacgccagaaaaacaagatgaggaagaacctgttaagctaaaaaagcctaggcaaattaaaaaatctaaaaaacccaagttctataagagaaattatctgggaaagctggaagaaatgactgaagaagactatgtcgttatatttagtgataaaaagaaaaaagaatatgtattcaatacatatcttgagcagatagaatttgacaatgagcttatctacgaacatataaacggaacatcttattgttcattattaagtcagactaaagaaactgatgtttttatcctgaccaacagtgatggatttacattagttaaaagaattaaagggatatggacaacaactgatcatgtaactccgtactatgttaaattattcacacaagacgacgaaggcaatgaagttttaataactagtgatcaatatattattgatctcaattcgtttgggtcctttacatacaagttccatctaggtgtaaaatgctataaaatagtagttaaggaaataactgcatgggaaaaaactgatgaggatgatgagattcctgtgtttataaatgtatcatcagaattaaatgttatggttaaatttaataaatatactaagatgttcgaaagaaggactaagcactataaagtcaaagataatagactaaatttcagaaaacctaaataggactaaattaattttaaaacacacaatgttattgtataatatagtttcaatgtgttaaatattttggatatttttaagtttttgagatatattaaaattttaaattttaaattaataaatttatttaaatttattatattattaattgataataatctatattatattacattatacatctgaatatttttgagatcccccatggaaaatattttataaagctctaataacatgagatgtatgacatacaaatgtgtgttaatatttataataatcaaatgtgtcaaatctcaagacaataaccctgatcaacctgatgatgaagaagaagaagataattttgaagttttagatctagataaaatcattcaggaccgaattagccgttttgaggatcctcaatatcaaccacaatatcaacaattacaagaatctcaatatccaacccaacctcagactcaaccccaacaatatgattattatcaaggagaatcacaagaattatcagtatatcaaccccagtattatcaatctcaatcattacaatatcaaccacaatctcattccgaacaatatgatcaatatcaaggagaatcattacaatatcaaccacaaactcattccgaacaatatgatcaatatcaaggagaatcattacaatatcaaccacaaactcattccgaacaatatgatcaatatcaaggagaatcattctattatcagcctgaattacaacaatatcaaccacagcaagtacaatatgggcaatatgtgtcttatcatcctactacggctccacaaacatcgcaacctacccaacaatcagaacaatattatcaacctagtcagccttatcaacctcagcaaccatctataccagaattaactcaaccaagttatcagaattatgaagttagtcaagttatccaacaatcagaacagtattatcaacccagtcaacctcaacaacctcagcaaccagatcagtattacgatccttatcatcctactcaacaacaacaaagttatcagtattatttatcaccatcggcacctcaacctcagcatcaatattatgaagttagtcaacctactcaacaacaacaatattacgaacctccacaacctgcccaaccaagttatcaatattatttacctccaccacctcaatcacccactcaaccacagtatcagtattatttatcaccaccacagcaacaacctcaaccagtaactcagtcacctcaacctcaatcagaaactgtagaagacgatgataatttctatgtgacagaacatgatcaaccacaacaggaaccttctgtaactgatactgggtttatatatggaccaactcaacctgctactcaacctgctataccacctacacaatatttaacgccacctcaagaacatgtagctgaagaacctactcaacagtcaattcagccacaaaagaaaccaggaaaaagaaaaagaactcgagctacaagtggagaggaagatgaggaggaggaagaagaacctgttaagctaaaaaagcctagaccaattaaaaaatctaaaaacatcaacttctataaaagaaactatctgggaaatctggaagaaatggacgagggtgagtatgttgttatatatggcgataaaaagaaaaaagattatgaattcaatacaaatcttgagcagctagaatttaacaatgaggttatctacgaacatataaatggaacatcttattgttcattattaagtcacagtaaagaaactgatgtttttatcctgaccaacagtgatggatttacattagttaagaaaagtagtgggatatggacaagaactgatcatgttattccaaattacgttaaactattcacacaagattctggagggaatgaaatcctattaactgaaggagattatgatattgattttacttcaagtggatcctttagatatatattaggcccaggtgtaaaatgctgtaaaatagtagctgagggtctgactgtatgggagaagaccgaaaaagatgatggttatcccataatgatttatttatcaataaaacgtataattattgttaagtttgaaaaatatagtaaaacgttccgtaaaagggttaagaaatttatacttttatacactagaaaattttgcaaaaagacataaatacaaataaattaattttaacagatacaatatgttattgtaaaagtagttccgtgtgttgaatatgtcaagtatttttaaattttcaggatatgtaaagattttatatattaattaatgaatatattaaaaataatcttatattgttaatttataataatcttatattacattgtattacatactttgaatattttcaagatcccccatggactaaagctggatcaattgtataatgaacagaaatattgtgtataattttatattaatatttataataatccaatgtgttaaatctcaagacaatgatcctgatcaaccaccagaagaagaagaagatgacaactttgaagtttcagatctagatgaaataattgaggaagaaactgctggatttatcaatcctcaataccaaccagaatatcaacaattacaagaatctcaatatccaacccaacctcaaactcaaccccaacaacatgatttttatcaatcttatgatcaaattcaaccccaacattatccagagtatcaaccagaacaatttggtcaatatcaacctcaacaatatggaccgtaccagacacctcaatttcagactcatcatatagcgcaacaaccatatgatcatcaagattatgtaccgccaactagtcaacaagcacctattcaaacagtaactcaacaaccacaacagcattatgtaccttcagcacctcaaactcaaacactgactcaaacccaatcatatgatcaatatcaaccgtatgtacccgtaactcaatttcaaatatctgaagaacaacaaatatctcaacaacctcaaacaacccaggaacctcaatatcagtattacttaccggaatcccaagatcaatatggatatcaaccgcaatatgaaacacaatctctttatgatactggtcaacaacaaataactcgccaaccagatcagtattatgatcaatatgaatcaacacctcaggtacctcaacaacaatattacgaaccacctcaacctcaaccaactcaacaaccacagtatcagtattacggacctcctacgctttatcaacccactcaaccacagtatgagtattatataccaccaactactcaacctcaacaatcagaaactctggaagaggatgatttctatatgacagaacatgatcaaccaatacaggaacctgaaacggtacctgaaactgaagctgaaccacaaactcaatcagaaacggtggaagaggatgataatttttatgtgacagagcaagatcaacaagtacaaccccaacaaactcaaaaaaaaagaaaggaaaaaagagaaaacaaaaccaatatcagaacaaaccaaaccgactcaacaacctcaaaaaaaagaaagaaaaagaaaacgtattggtgctccaggtgaagaacaatcagaaaaaccaagtggatcagaaggtgatcaaaaagtacctagaagaaggagaagaagacctatgaaacgtaaagtatataacgaaataaaattttttaaaattgattcaaaaggaaaactcgtagaaatgactggtcgtgactatgatgttacatttgatgatcgtgataaaacaaaatacaaatttatttcaaatcttgagcaaatagtaagtgatggtgaaattatttataagcatttttacggaatgccatattgttcattactaaatcacagtaaaaaaactaacattcatatactgacagatagtggtggatttacattagttaaaaaaactgatggatcatggacaacaactgatgcggtgattccagattttgtcaaaatgttcacaaaagattctttaggcaatgaaattataataaatagtgatcaatatactgttacttttacatcaagcggatcttttagatacacattcctcccaggcgtaaaatgctatgtaatagtagttgctggcctagttgcatgggagaaaaatgaggaagatgaggagggttttcccttattcttttatattacacaacaattgcgtgtattgcttaactttgaaaattattttataatcattgaaaggagggggaaaaaatatcaatacatccgcactaaatttacttccggtagatctaaatacaaataaattaattttaaaacatacaatgttattgcataaatagtttcgtgtgttggaactggttaagtatttttaagttttcatgatatattaaacatttaaatgaatgatttattaatttaataaaatttattatatatcaatttataataatcttatgttacattgtattatataattaaatatttttaagatccccatgcagtaaagctggatcaattgtataatgtacaaaaatattgtgtataattttatattaatatttataataataaaatatgttgaatcacaagacaatgatcctgatcaaccagcagatgatgaagaagaagataataattttgatgttttagatatagaacaaatcattcaggaacgacttagtcgttttgatgatcctcaatatcaaccagattatcaacaattagaagaatctcaatatcagccccaaccagaaactcaaccccaacctctgactcaaccccagtattatgatctttatcaaactcaaccagaacctcaatatcaacccgaacaatttggtcaatatgaacctcaacaatatggaccagaatatcagttataccaaacacaaactcatcatatagaacaacaatctgatacatatgggtattatgaacaatcaggagttagtcaaccacaacagtattatgtaccttcagcacctcaaactcaaattcaaattcaaattcaaccccaatcatatgatcaatatcaaccatatgcacccgtaactcagcctcatacaactcaggaacctctttatcagtattacttaccggaatcccaggatcaatatggatatcaactgcaatatgaaacacagactctttatgatactggtcaacaaccaataactgaaactcaaccacaagaacagtattactatccttatcaacctacccaaccaacacctcaggtacctcaacaacagtattatgaaccacctcaacctcaaccaactcaaccaccacagtatggaccgtatcaacattatatgcctccacaaactgtaactaaagctaaacaaccaacagaacagttagaacctgaagttatacaagttcaacagattgatgatgaggaaagagagaaaaagagacaacaaagagccaagttgttggataaattaaaaagaaaaatacaacgtccggataaaacaaagccatcaaaacaacaaactgcccaaccaagaaaaagaaaaagacctcgaactacaagtggagaccaaggtgaggaggaggaagaacaaaaacctaaaagaggaagactgcctaaatcctacagaaaatctagacatatcaaactattcaaatttgattctgaaggtaatctggtccaaatgactgagcgtgactacgatattagacatagtgataaaactagatcaatatatgaattcaaaacaaatctcgaacaaatagaatttgacaatgaggttatctacgtgcatacaagtggaactccttattgtttttcattaagtcatagtaaaaaaacggatataattatcattactaacattcaagaatttgtattaattaagaaaaataaaggaatatggacaagaactgatcatgtgactccgtactatgtcaaattctacaaacgggattctggagggaatgaagttttaataactagtgatcaatatagtattcattttacatcaatcggatcctttagatacaaattccatccaggtattaaatgtactaaaataatagttaaagacatggtggcgtggaagaaatctaataaagatgatgggtttcctgaactgatttacgttagtccaaaattgagtgttatacttaggtttaagaaatatactaaaactttaggaaaaaaacataaaaaatataaaatcttacacactaaaaaaaatttaaaagaacccaaatatatctaaattaattttatcatataaaatatgttattgacatcgtcattattataatatgttaaatatctcatcacaagactcaactaaagattaagataatcaaaggattaaatgattgacttattaatttattaaagtgattctaattattaatctataattgattttatattacattgtactatacatctgaatattttcaagatcccccatggatcaaagtcatattaatagtataatgaacaaaaatattgcgtataatttcgtattaatatttataataataaaatatgttcaatctcaagacaatgatcctgatcaaccatctgaagataatgaagatgactataattttgatgtttcagatctagatgaaatcattgaggaagaaactgctgtacttatcaatcctcaataccaaccacaatatcaacaattacaagaatctcaatatccaacccaacttcagactcaaccccaacattatgatctttatcaaggagaatcacaaggatatcaacctgaattattaggatatcagccagaacttttaccgtaccaacatgaatcattacaatatcaaccagaatcatcgtgttatcaaacagagttattagaatatgatccttataagcaataccaagttcagacacaagaacaacaattagaagaacctcaacatcattattacggaccaccacttactcaaacggttacccaaactcaaagtcaagaacctgaacaatattatggaactgcacctataattcaaccccaacaatatccagaatatcaaccagaatcgtcaggatatcaacctgaatcacaaggatatcaacctgaatcatcagaatattatttggagcagcagtattacccaggatatcagcaacaacagcaacaatatcaaactgatacttatgggtattatcaacctccagcacctactcaacaaataactcaacaacaagaacagtattatataacaccaccacatcaaccatcctatcaagaacagtattacgaacctccagtaactcaacctactcaacaaccaagttatcaaaattactaccctgggtatcctccacatcaaccatcctatcaagaacagtattacgaacctccagtaactcaacctgctcaacaacaacagtattacgggcctcctactactttaccccaacgcactcaaccagatcagtattatgtaccaccacctcagcaaacaacggtacagccatcaagtcaaccaaggtatcagtattatcggcctaatcaaccaatagaggaacgtgaaactgaaacgggtcatgaaactactcaaaaatcaactaagcgacaaaataaacaaagaaaaagaactagagctacaagtggagatcaaactgagaaaaaagatggtgaagaatctgttaaacgaataaggccgttagttaaaaaatatgatatcaaattttataaaagaaattatctgggaaagcttgtagaaatgattgtttgtgagtatgttattacatatactgatacacataagacaaaatataacttttatgcagatctccaacagatagaatgtggcggggaaatagtctacgtacatacaaatggaagaccttattgttcatcattaactcatagtaaaagaacagaaataattgtcatgacaaacagtgatggatttacaataattaataaagttgacggagagtggacaagaactgatgctaatattccagattatgtcaaattctacaaacgggattctggagggaatgaaattttaataaccaataatgaatataatattgattttacttcacttcgatcctttagatacacattcctcccaggtgtaagatgtcataaagtacaagttggtaatctagttccgtggaagaaaactgaagatgatgataattttcctgagttaatttatgtatcaccaaaattgactgttatacttaagttttataaatatactaaagtcttcgaaaaaaggggtaacatgtatcaatatttacgcactaataaaaatttaataaaagccaaatatacctaaaataaccttaacagatacaatatgttattgtaaaagtattttcgatgtgttgaatatattaactattttaaactattcagggcatattaaattttaaatgattaattaaattttttaaaatctgcttatatatcgatctataataatctatattatattgtattatataccttgaataatttcatgatcccccatggatcaaagtcatattaatagtataatgtacaaacatattgcgtataattttgtattgatatttataataatccaatgtgtcaactcacaggacaatgttccagatcaaccagctgatgatgatgacaattttgatgttttagatctagataaaatcattgaagaacgacttagtcgttttgatgatcctcaataccaaccacaatatcaacaattacaagaatctcaatatccaacccaacctcagactcagccccaatcacaaactcagccccagtattatccaggatatcaacctgaaacagatcagtatcaacaagaatatcagtattatccaggatatcaaccagaatctttagaatatcaacctgaacaatatggtcaataccaaccatacgaaactcagattcaaactcaagaacaacaatattatgtaccgccgactagtcaacctcaacctcaagtaactcaggaatctcaatatcagtattacttacctgaaactacagatccttatggatatcaacagccatatgaaacacagactctttatgatattggtcaacaaccaataactgaaactcaaccacaagtaactcaatatcaaccagtgcatcatccatttacttattctgatgatacatatggaactcaagttactcaagctctgcctcaagtaactcaacctactcaacaaccacagtatcagtattatcaacctactcacactcaaacagaagtaactcagcctcctcaaactcaatcacaaactgtggaagaggatgataatttctgtgtgacagaacatgatcaaccagtacaggaaccttctgaaactgagactgggtttacatatggacaaacacaaccaactactcaagaacctactcaacagtcaattgagccacaaaaggaagcaagaaaaagaactagaactagaagtacaagtggagatcaaggtgaggaggaagatggtgaagaacttgttgaagtacatccccttatttcatctgaaaaatctgtacatatcaaattttataaaagaaataatttgggaatgcttgtagaaatgtgtcgtaaagattatgtcgttacatttgctgattcacataaaagaaaatatagattcaaaacaaatctcgaacagatagaatgtaacaatgagataatctacgtgcatacaagtggaactccttattgtttttcattaagtcatagtataagaacggatataattatcattactaacattcaaggatttgtattaattaaaaaaaattatggaaaatggacaagaactgactttacgattccagactatgtcaaaatgttcacacaagatattggagggaatgaacttttattaactattgatcattatattattgatctcacttcatttggatcctttaaatacacattcctcccaggtattaaatgtactaaaataatagttaaagacatggtggcgtggaagaaatctaataaggatgatgggtttcctgaaataatttatgttacaccaaaattgactgttatacttaactttgaaaaatatactaaaacgttcgaaagaagggttaatacatatcaacttttacgcaaaagactaaatttaaaaagacctaaatattcctaaattatttcaacacatacaatgttattgcataaatatttttgatgtgttgaaactggttaagtatttttaagttatcaggttatattaaacatttaaatgaatgttttattaatttattaaaatttattatatttttaatttatattatgttatattatgtattatatactttgaatatttttgagatcccccatggaccaaagctatattaatagtataatgaataagcatattgtttataatttcgtattaatatttataataatccaatgtgttgaatctcaagacaacaatcctgatcaacctgctgatgatgaagaagatgaagataactttgatgttttagatctagaacaaatcattcagcaacgacttagtcgttttgatgaccctcaataccaaccacaatatcaacaattacaagaatctcaatatccaacccaaccagagactcaaccccaacattatgattattaccaacctgaattacaaggatatcattcagaattatcatattatcaaccccaacatcagtattacccaggatatcaacctgaatcacaaggatatcaacctgaatatcagtactatcaacctcaaccatatggtcaataccaaccatacgaaatccagattcaaactcaagaaccaataccatattatgtaccaccacagcaaccaggtcaatattatatacctccagtaactcaacctactcaacaaccaagttatcaaaattactaccctgggtatcctccacatcaaccatcctatcaacatcagcattacgaacctccagtaactcaacctgctcaacaacaacagtattatcaacctagtcaacctactcagactcagcctcaactaccacagccacagtatgagtattatgaacctagtcatcctagtcatactactcaacctcagcatcaatattatgaacctccacaaacataccaaccacaacagtattatcaacctactacggctccaccgcctcagccacaattaccacaacaacagtatgagtattatcaacctactacggctccacaaacatcgcaaccagaacagcaacattattatgaacctactactactcaaactcaacaaccagaacagtattatgatcctagtcatcctacccaacaacaacattattatgaacctccccatactcaaacagaagtgattcagtcagagcctcagtcaccccaaactcaatcagaaactgtggaagacgatgataatttctatgtgacagaacatgatcaaccccaacattatgtgcctccacatactcaagtaactaaagctaaacaaccaactggaacacaagctgaagttatacaagttcaacagattgatgatgaggaaaaagagaagaagagacaacaaagagccaagttgttggaaaaattaaaaagaaaaatacaacgtccggataaaacaaagccatcaaaacaacaaactgcccaaccaagaaaaagaaaaagacctcaaactacaagtggagaccaaggtgaggaggaggaagatgaagaagaacctattgaaatacaatcaattgttccaattagaaaatctagtgtaatcaaactttttaaaaaggattcttcagaaaatcttgtagaaatgactgataaagattatgttataacatttgatgattcacataaaagaaaatataaattcaaagcatatcttgagcaaatagaatgtaacaatgaggttatctacgtacatacaagtggaacaccaccttattgtttttcattaactcatagtaagaaaacacatataattataattaccaagagtcaaggatttacattagtaaggaaagtcaacggagaatggacaagaactgatgctaatattccagattatgtcaaattctacaaacgggattctggagggaatgaagttttaataaccaataatgaatataatattgattttacttcacttcgatcctttagatacacattcctcccagggacaagatgtcataaagtacaagttaagggcgtgattgcgtggaagaaaactgaagatgatgataattttcctgaaataatttacgttacaccaaaattcggtgttatacttaagtttaagaaatatactaaagtcttcgaaaaaaggggtaacacgtatcaatatttacgcactaataaaaatttaataaaagccaaatatagataaattaattttaacacatacaatgttatagtgttatggttatactaattatagtttgttgaatatctcatcacaagactacactaaagattaagatcattaaacatttaaatgattgacctattaatttattttaaaatctgctgatatatcaatctataataatctatattatattgtattatataccttgaataatttcatgatcccccatggatcaaagctatattaatagtataatgaacaagcatattgcgtataattttgtattaatacttataataatccaatgtgtcaaatcacaagacaatgatcctgatcagcctgacgaagaagatgaagataattttgaagttttagatctggataaaataattgaacaacgaattagtcgttttgaagatcctcgatatcaacattatgattattaccaacctgaattacaagaatatccaacccaaccagagactcaacccgaacaacatgatctttaccaatcttatgatcagtaccaacctgaatcacaagaatatcaacctggagatcagtattatccaggataccagcaagaacatcaacaatgtcaaccagaatatcagtattatccaggatatcaaccagaacatcaacaatatcaacctgaacaatatggtcaataccaaccatacgaaactcagatacaaactcaagaacaacaatattatgtgccgccaactacgcaaccagcaactcaggcacctcaagtaacccaggaatctcaaacaataattcattccactcaaccaacttatcaacaacattatggattttatcaacctgtacagcaaactgaacagttagagcctgaagttatacaagttcaacagattgatgatgaggaaaaagagaaagagagacagccgagagctcaattgttggaaaaattaaaacaaaaaatacaacgtcctcaatcgtctcaaccaggaaaaagaacaagacctcaaactacaagtggagatcaagatgaggaggaggaagatgaagaagaacttgttaaagtacatccccttatttcacctaaaaaatctatacatatcaaattcttcaaaagggattctgatggaaatcttgtagaaatgacttattgtgactatgtcattatatatggtgatccaaataaaacagaatatatgtttattgtagatcttgagcaaatagaatgtgacgatcgaattatttatcaacatatagatggaacaccgtattgtgtgtcattaattcatagtaaaaaaacgaatgtttttgtcatgacaaacagtgatggatttacattagttaaaaaaattagaggaaaatggacaacaactcaagaagcaattccagattttgtcaaaatgttcacaaaaaatgaggagggcaaactaatttatttgaccaaagaaaaatatactgttacttttacttcaaatggatcctttagatacgatttaaatccagatataaagtgctataaaatagtagttaaggacatgattgcatgggagaaaactgaagatgatgatgggtttcctgaattgatttatgttacaccaaaattcggtgtcatacttaagcttaacaaatatactaaaacatttgaaagaaggactaggaaatatcaatttttattcactaaaaaaaatacaaaaaagggtaaatattactaaattaattttaacacatacaatcttattgtataaaatagtttcaatgtgttgaatattttgactatttttaaaaattacaaaacacattaaaatttttaattttaaattaataaatttattaaaaatgatctcatatattaaataataattataagccattaataaaaataactatttatttccagatcccccatggagttaagccatattagttgtataattaacagatctttaatgtatacatatggattaatactaatattaatcccatgtgttggatgttccgatgaaaagggtaaaaacgatactaatatagtatcatatagtgatagtgaagaagaagctgataactttgaagtaatacaaccagtaccaatacaacctcaacctcaacctcaacccataccaccacctgttacttatacggaatatccttatcaacaatatcaacatcacacacctcaatacccttatcctacagttcaacaacctttagaacaatcttatcaaccacatgtgccacaggaacatattccaccaactcaacctcaatattatgcaacaccgtatcaacagtactatcctggatatccgccacaaccagagccacagccatatgatcaatatcctggatatactgtctatgatcctggatatcagccttatcaacaattatatcaaccagaggtacaacagtatcctcaatactatcctggacctattcaaccaagtcatcaatattatgtaccaccaacttatcaaccacctcaacaaccaataactgaaaccgaaactcaaactcaaactcaaccttatcaaccctatgtaccacaaacgactcaggaacctagtggatatcaacctagtcaagaaactacgaataccgcagatggtatattgggtccagcaccaggaccattaagacatactagacagatactaagagaatatgataaaggtcttgataaaatatatattgctccatcttcggaagaattaaaaatggaaaaaccattagagttaaagctcttcaaaattgatgatgaaggaaatttggtagaaatgactcccaaagaagattacatcataaaatttatcaatgtgtataaaattaaaattgaattaaggtcaaatcttgaaaaggtaatttataagaatgaaattgtttatatgcacatacctggaaaaccgtattgcacagaattgacgaaattcaaaaaatatcctgttattattttaaatcgtgaagatggatttctgtttgctaatcgctgtagaaaacagtgggaaataaaattcagaaattttccagagtacgtaaaaatgtatggagaagatgctgaaggtaaagagtttcagctcaataaagggcattataatcttgaacttacaacaaaaggatcttttgaatacaaatttattgaaggtgtaatgtgtaccaaagttatagttaaagagaagctagtttgggaaaaaacagaaaaagaagatcatccaagaatgttaattataacgtttaaaatgaacgtagttattcattttaaaggttatgttagtgtatttaagtattttgcaggaaagtataggaaaatgtacagtgaagcaagtgtagaacccttggatgaataataaatcaattgtgatatttgtaatccttttaatgtaatttaacaatacatttgtatattattaatatcatttttcacctcgaaaaccagattataaattaaacaaattaatgttaggtgttattttaaaaaagtcattttctgtgttttaaaaacaacaaattaattgaagattagtatccaaagcattattaattaaatacatttgaataatattgtacatatgattagtgtgcataaattttatatttcaggatccccattcatcataattatgacagttttataatgaacaaatactttaaatatacatatgtaataacatttataataattggatatgtcagatgtgctgacaaatatccagatcatccagatgacggagatgatagtgatgaagaggataattttcaagtaatcgtaagaggaattgaaaatattcttgaagatgaagatgaagatgaaaaaactgctggagaatcattagtttcagatagtatcatgaaacatggacttggacctctcactgatcaaggttatataaaaccagatcagtatcaatcagcaccgtcttatcaacaagaagatttaacgggatatgtagaaactggatgtgatgaaggagctgttggttatgacgcaggatataaacaagaatattattcagaaggttatgaacagcaacaagaagatagtagttatgatcccaattattatacagtagctgaatcaacaccgtctcaacctacacaagggcctaaaattgaatcaagtgttccggattatcacccaggttccgtaaatgttccgcctatttacacatttcctaggcctcctgtaaatataggtcctagatatagacctttaatacatggagctccaacctattttggaccaccttatttaccaccatattttgcaaatattgataaactcagattatctactcctgtacctggaagcctattaacatctccttatttactcactcaaggttcacaggttcaaacacatcccgtacaacaacctctacaaccaataggggaacctattcaagaaaaagctccatctaagaaagctaagcatgttaaaatatgtgaaacaataacattctttacgaaggattgtcacgatgattatgttccaatgaatgaaagtgagtataaaattaccttggagagcgaaaatatagtgaaatataaattcaatgcaagacttgaaatgataatgtgtgacaatgaaactatttatatacatagatgtgataaaccatatgccacgtttttaacacataataaaaatgtttgttcttttattatcgctcgtgatggaggatttgtttacattaatttcgttaatggtaagtggataaccaatgcgcgaagaaatatggatattgttaaattttacatacttgattgtgaaggtaatgatgttgagcttactgataaagattatcattttgatcttagtcctaatggttcatttaaatatatatttaagtcaaaaacaaaatgctataaagttgtggctggaggggatttaatttggaaaaaaaatcccggtgatgatttcccacgttcagtgtctgttaccactcgattaaatgtcataatttttacccatggtgaaagctttatataccaaaaaattgataaaggatataaaagagtgcatgataaataatttcaaatatatataaagattcgtaaactttttagtagattcagtttaatatccaatagacattaaattctggattaatctcttaaatattaacacactgcattaaaaaatattttaataaataaacacacactatcaattttgatatatataatttggtttttagcagttatatcaatagaaattctaaaattaatttatataatgattccaatagttagatcttgaattatacactgaattaaataggtttattgatttttagatcccccattagttgatgttaaaaaccatcaaaataatgaataaatatgtaatatatggatatatattaacactaataacaatccaatgtgttaaatcagcagatgaatatgctaataatgcaactgatgatgaaggggaggaagaaggtaattttgaagtaactgaaactaccggacaacctcaaccaagtcaattattacctcaaacagaacatgtacaacaaccacagccagtgcaacaatatggtcagtatcccacttatcattatgctcaatatccaggatattcaactcaacaacctcaatattaccatgggtaccaacaacctcaaccttactattatcctggatatcaacaaccttactattatcctggatatcaacctcaacattactattatcctggatatcaagttactcagccaccgcagcaacccgcacctgtgcagccatatcaagtgtatggaccgtaccaaccacagccaataccaacacaacctcaacctgtgcctgtacagcctgcagtagtgcaggaaccgtatcaggtaccacctgtaacacaaccagaagacggtacaactccatctcaagaagtatataacattccagttattgtgagcggaattagtaaaccacaaaagtataaagcaaaacaaccttcacatgtatatattaaggacacaaaagtaaaaccatatggagaaaaaaaatgtaatgtaatcaaatattttaaaatagataatcaagggcaattagttgaaatgtctgaaggtgattattataagtcagctgatgataataatagaacaaaatatagatttaattcaaaacttgagcatatatggtgtgatggtgaaactatttttatgcatatacctggaacaaaacatgctacatcattaacatatcacaaacgtaataacgtatatatcgttcgttttgatgataggtttttaatgataaaaaatcataaagggaaatgggtagtaaattcacgcataattccgacatatgttaaaatgttcaaagaagggaaaggtaaaaaatatgtagaactaactaatatggattattacgtaaaccttagtttatctggatatgttaagtttatattttctccacatgtaaaatgtacaaaagttacaattaaaggccaagttatctgggaggaaactgaaggttgtgattatccaaaaggattgagtataacatcaggcagaaacttagtaatgtattttgtaggatacctccaagtgtatggagcaagaggggataaaaaaacatataaactcataactaccaaacaaacctatgaaaccatagactatgaataaaatcaatctgatatatataataaacatattaattcattatattcatgtaacttaatgttatttaataacaataattgaaactgtgtttaaagaaatttttacacacatgaatttatttatataatttagtttctgatattcataaagtaaggtaatttcatataaataaaataaatattaatttataatagaaatgtgtaattattacaaacactattctggagtctttgatcaatatttcagatcccccatggaataaagatctattatacatagaatgaagttatgtgtaatttacacatatataataatatttttaatttttagatttgttaactgttttgataaatatccctttaaatcgtctgaagttactgatggtgatgatgacggtgatgataataattttgacacaataattaggggaattgaaagtctactcgaagaagaagatgatgaaaatattgatgaacatggatttcaatctatagtaacacagctagaagatttagttgctgatgatactttccaaccgacagagcaacctactcaaattaatttacctcctcagccaactcctgaatttcaacctatacaactacctgaatattctaatgtaatacctcagactgtacaggaaacctcaaaacatagttataaacataatagaccaactaaacccgaacacagtcagccatctcaacctagtgaatctaccgaatcacaaactcaacctcaaacttctgatcagccaatcgaaccaagtggcacagatcagcagttacaacctgaacatattcaagttgaactgggatctgatgaggaggagtatgatgatgaggaacctgaagaaggagcagttggaggagctggaggtggagatgaggacgaagaggagaagaagaaaaagaaagaaaagggaaaaccatctgtaccagtaaaaaaatgtgaaacaataacattttataaaaaaaatagtaatggtgagaaagtagaaatgtcttcaacagaatatgaaaaagtatgggaagataaagataaagccaagtataaatttaaatctgaacttgaagtagtaatatgtgacaatgaaactgtttatgatcgtctccccgaaaagcctcattatacttcattaacacattataaaagtgataataaattagtctttttatcaggaataggatatcttatagctgaatacgctttcggtagatggaaaagaagaacagataatgttgttgagaagctcaaactttacactaaaggtaaaaacggggaagaaattttgttaactaaaaaacattatgaatttaaaactaatgatagaccaatgtttaaatatcgattgaaaccacgtgcaatgtgttttagaattgaatatggaggtcacactgtttgggagaaaaaaggtgaaaaacaacatcccataggactgaatattacatcaggaaaaaacatcataatatatttcaaaacattttacagaatttatggaacgtctggtggagaatacagacaaatacatggtcaaaaaattaaaaagtattaaaaattaatatactcgaactaatataatacctataccataccttaactatatactgtactaaatatcataatatgtattaactatacacctgctatgctatcaaagtatactatactgtgactaatactatagtagattgatattgttaatttggtctttaattagtgtataaatggaatattctaaattataactcatttttatgactttataataattttaaactatattatgaccaaaacaaactaattatcacatccccatggaataaagttgaactttgcatatcgaaataatgaataaatgatgacctatacatatttatatatatttatactatttgaatgtgtgaaatgtgccgataaacaaaataaaaaattaaataggaatggtctgagcctggtatcatacagtgatactgacagtgatggagaggaagataattttgaagtaactcaaactaataaagtagaaaatcaaacagaactggaatcagctcaacctactcagttatatgctccacaacgactacagtatataatacgaccccaacctcaaacatatcaacctataacacatactcaatactatgggcctcaagaatatcctggatatattgtctacgatcctggttatcaacattatccgcaatatcaagcgtatgtactgcctgctcaacagcagcctgtaccttccgacaaacaatacctcaacaaattcaacaatatgttccaataactcaacctcatcaacagatacagtactatgttgaccaatctcaattacctatacaacccataccagtacagtatgtacatccacctcaagctattcccattagtcaaccatatcaacaacaattagtcattatgtaccagtatcggagccaataccccatgctgttccagaacagtcaatacattacggaccaactcaagttgtacaaccacaatatcacggaactggtcaaccacctcaaactatacaaccgagtaaaccaactaaatctcaaccaagtaggacagatggacctagtaaaccaactaagctcagtgaaccaactaaatccagtggttcagacaaggaattagaacctgaagatattgaagttgaagtgggatctgatgatgaagaacctgaagaaggtgcggttggaggagttggagtaactttatgtaaagaaatcacactgttaaaaaagggtaaggatgggcaattagttaaaatgatagaaggagactacagaaagatacatgacaatgaatacaaagctagatatctactttatgcaaaacttgaacagttgttatattgtggtgaaattgtttatgtacatagagctgaaatcccttatccaacatcattttctcataataaagtggttaaaatgatcgtatttcgacgattatattcattcatgttagctaggaaacgtaaagggctctggatggtgaatggacgtaaaataccaaactacattagattatacacacaaaattctgagggtgaagatgtagagcttaatgaagatcattattatgtcgattatacaccatcagaatcctttaagtatacatttaaacaaagtgtgaatttcaccaaggccattatgaacgatttaacctggaccaaaaaaccgacagatggtcgtgttgtagcctgtgctgttacacatcatgggtctttaatgatatttttcaaaaaatattatgaggcatacagaaagattaatggagaatataagatcttttacggcaaaacagaaagaaaatttgttaaataataatcatccaactcattactttaatataatatacttaatctactcataacacatattttttaataataatagaatatatttaacacatgaacacacacattaaattttacatttgatattttaaattttaatataggtggtatgttccaatttatatcttagttaaatcttgattatatttctagataatacggattattattttaaatcccccatgaaataatacattaaaaatcaaataatggatttatgcaaaacctccaaattactatttttaataatatcagttggatatgttagatatgctgatagttctgatcaaccaggtaacccacatgtaactactgaaaatgatagtgaagaagaagataatttcgaggtaactgaaacttctgaaactcccagtggttctgaaccatttaaacagaaagattcatgtgattcaataatttttatgaaaaaaaatgacgatggaatactagttccaatggacgaaaaagaatataaactgatatttgaaaatccgtttaaaaaaatatttatatttcaaaagaatctagaaatgctactttgtaattatcaaaatatttttgaaaacttatctggaaatccttttaccgcatcattaacatattttaaagataaaagcgtatttataattcgacgtaaggatgaatttatatttattaggtacgaaagaaggaaatggagaatatgtccacggaaacgcctgggtcttattaaactttacacacgagatggtgaagatcatgatgttgaactgggagatgagcatttttatgttagtttaagttcaggcggatcattaaaatatgaattaagaagtagtgtaaattgtactaaagttgtgtatagggataaattaatttgggaacaagggactcatgaaccttgtccattcaaaattggcattaatataaaaaatgaagttatactttatttttatgatttttatatcgtaatttcgagaaatcttcaaagttttaaacgctcatacaaagaaccaataaaaaaatatcttgatgatgattaacataatacacaacattataatattatacacattagactctattatacacactatagtgtatgttttatatttatataatttgatagtttaattttttttgtaagtttgatactacaatttatttcaataactgttaaatatttgaaaagcagttcaaatttacattatttctttatagagaaaataagtgatataattatctgtaaatctaatatatgttgtttgtcaattgaattaatatatctaatatataaaactatatatagttgttttgaattgtagtaatgtgtcgtcaaattccaaactcagctactctaatatcattaaaatatctggtaaaagatatcaactttaattaactcaatttctaaatcatttgattttaatgctattatcatgtcagattctgaatattttaatattaacacatataaatattccaatatcgtgtgcacacagggtaatttataatttaccaatatatagagataaaaaatattactaaaattaataatagtacactaataaactttttaaagttaatatgaatataacatattttagcttattggtataatttagtgataatattatttagataataataccctacttttgaaacaatttatagattttcatacacacaccagatttaattatacttgatagatagattagatatcttttatcatttgtttctaaatgatatttaataaaattgtacaaaggatattaattatgagatgcatgtgttccaaatatggattacgctaataatcacagtaattgtatatgtagaaagtgctgataaatcaagtgatgatttaggtaataaagatgatgctataggagatgatttagatgaagatgataacttcgatgtgacagaacaaactgaaacgtctaaggattatcataaacaggatgatattccacaaccttctactgaagtaactgttgaggatgatgattttcaatcagatcaactagaaattgaagagtttgatggtcttcagctacttgaactttatgaagaaatattggaacaaatacctgaaatcattcctgatcctacagaataccaagatctagataaatatatattctctcctactacagatcaacctgaagagccacaacaacctatacccgagcaaccaactgaaacaactgaaccgtattcaccaatttaccttgatgaaactcaagaacaagctattacacaaccacaaccaagtcatcagtattatcaacctactcaaccaacacctcaggtacctcaacaaccagatcagtattatgtaccgccatcaataccgccactaagtcaaacccaaccaagttatcagtattatcaacctactactactcaaccaccgactcaaacagaaaattactatataccacaattaccagatcccactcaacaaccaatagattattatacaccgccaactattcaagcacaagttactcaagcgagtcaaccaagttatgaatattatcaacctcctagctatagtccttatgaaatttcaccactacaacaacaaccttatccaactcctcaattaccacaacaaccacaaccttatccaattcctcaattaccacaacaaccacaaccttatccaattcctcaattaccacaacaaccacaatcttatccaattcctcaattaccaatacaaccacaacctcattatccgcaagctcattatcttggatatccacctcaacagcctatagtacaaccaatacaattaatacctcaacctccaacacattatgtgcctccaccgcagcaacaaattaatctaccgcctacacaatatatgtttccacctacaagtcaaccaacacctacacaaccaatatatatacctccagctcagtacgaaattcaggaaccagcaccggtggctcctattctacctactaagaaacgaaaaaaaactgaaaagaagactcggttaaagtgtaggacaattatattaatgaagaaaaatgaacgaggtgaattggttccaatgacagaaaaggaatacaaaaaaatgtattatagtagatataaaacaaaatatgaactctatgcaaatcttgaacaactgttttgtgacagtgagttagcttatgaacacaaaattggaaaacattatccctcaatattaattgaaaataaacgacttagagaattttacatctattttgatgatgaattaactatagttaagcaagttaacgataactactggcaaacgacagagtgtacaattccatattgttttaaatttctcaccaaaaatgaaaaaggccaagaagttttaatacctagaacctttttggatattgatatcggcttttatcaagctatcaaatacatatttacggaagacattaaatgccataaaattattgtcaaagatcaattactttgggaaaaagtggaagacgatatgggttttcctgagtcaattgtattcaccaaaacaggaaaaattctaatatttttctatgatgatattgttttatatttaaaaaaagatggctattatgtacattcatccaccagaaaaagaagacccagtaaaaaataataatataacatttgtaatatgtttaatatacataaatcacactatactaataattcatacctatatattcccagtattatgttacaagtgtggtaaatgccaacttcagttaccgcttctacccataggataatttacattcagagaatatattgcgtttgactatctcaattataaattcatttgatttttattcttaacacgttatattatgaattttttaataataaaagatatattaagtattcaaatttatatatacacgggataatttattattttccagtaaagtagcaagaatcgataaataataataatacactaataaactctataaaattaatataaataaaatgtattttagtatattaatataatttaccgatcttaatattagatttgacaccctacttttaatattttatagatctatatacacatataagatttgagctaatttaatttgaaatatccattggatatcttttataatttgtttctaaatgatatttaataaaattgtacaaaggatattaattatcagatgcatgtgttacaaatatggattatattcatattgacagtagcagaatatgttaaatgtggtgataatccgaataacacacatggtactatagaaaatgatagtgatgaagaagatgataactttgatgtaactgaaccatctaacgatgttattccacaaccttctagtgaagtaagtgaagaagaagaaattcaattacaattatcagaacctgaagaacaaccatatcctttaggaccaccacaacccacacatcaaccttttattatagaagaagaacaagcagaacctctcgatttatcaacacaaccacaaccaatacagctacaaccagtacaaccaatacagccacaacaaatttatccgcaaccaatacatcctgcacatcctcctcagccaatacagccaccattaccattacaaccacaatttcctcaacaattacaacctggttttccaattagaccaatagcactttatccaaggccaccaatacaaccaattcaaccaccactaccattacaacctggtcaccctgctcgaccaataccacgatatccacaagtttctggatattcaccatatcatccctatgcaaggccgccatcaccagtacaaccaatacctccaccgtcaactcattatgtaccaccaactcagcctcagcctcagcctcaagtgccacaaccacagtatcagtattacggaccgccaacacattatatacctccaactcagccagtacaaccaacacctgcagaaccaacacattatatacctccaagacaaccagcacctcaatttcaacaaccagtacaatattatatacctccacctcagccaatgtctcgtcctccaacatattatgtacctccaccaatgcaaccagcaccggcggctcctagtcaacctactgatactcaagaaaaggtaaccacaaaaagaatagttaaaaagtgtaagataattaattttatgaagaaggattctggaggtaaattgattccaatgacaagaaaagactacataagaatatataaggattcagcaaaagcaaaatttaaactatctgcaaatcttgagagggtactttgtgacggtgagctggcttatgaacatacacctggaaagccttatccttcattattaattgaaaataggcgattgatggaatttatcgttagatgtggcgataaattaattaaagttaagcatcatgataatatatggaaaagatttgaatataatgttccactttattttgagttttcactaaagatggagaaggaaacgacgttataatacctaaggaatttttagaagttgatttcggttactatcgatcttttaaatttttatttatagaaggtactaaatgtcataagattatggttgaaaataaattcttttgggaaaaaggtgatgatgaagattttccagttggatttgctattaccactaaatccaaaattgtaatatttttcgaaaaaagaactgctgtatatacaaaattaaaagattgttataaattgttatacagcaaaccaagaagaaactctaaatatgagtaatattacacttttaataaaatcaagtaatgtaacatttataatatattttaataacaaacatacaattgtaccaatattttattattaataactatatattataaatagtatactataaaagttttaaatcagaaactcaaccactgattgtgaacctcttttccttcatattttgttcactcattccactttcatttcatcaactaaacaatattatttaaccactcatttacactttctaatctctttaaactttattacaacttgttattcaccagttttttactttagatctgagttttactcttagtggattagttacaaattctgctatgccatatatacttccatgtatatacactctgtatattatagccggtatgtataacatagccagtgataatgacattccagtgtatattgcctatttaaggatttgtttatacatcagaaagattagcatagttagttactgggacttggaatatcagtttcagggactgtgtcgacctggtcctaccaacttttgagcctcgactggccaattgggtatatggatttttagtcaattttagacacattaacgttaatttggattccattccccatttgaaaacttagttacacacatcatttaatttctttcacacacatttgtaatatgtttatatattaactttaaactatataatagtgtttttacttaaatttaagactaatatttcacaatttaacacattcaaatcgtcacacacatgaataaaacatcgaaacattccaaaatcatataaaacagaattaacatgttgtcaggatactacttaggtcatgtactgatgttaactaatgttattcctttgtccatcagttacttcatccatctattggtaccaatgagtaattgtttgaggaataactcaactcaatttggtatttttaattcgaatcataagtcagttgttgatttagaggttcaagtaagtagttaagaaccataattgacagactcctaagggcactaatctagaacacatacaagtaatgaccaatacctaccaacgaaaccacctaactaaggtaataggtcaaaccaaaccaactaccaaatgacctaactgacgtaatgtcctatctacctaatcacctaattacctaagtcctaatacctaattctttgactctcagatttggggtttattataatttcattccattactgtactttactacctcttaattctcactgtcattattttatcaccttatccattataacgagttaactgtttcaaggtattgttttagacttgagtttagagagtatcaaagtaagtttttagattaattatttagatagttttatagatgagtattaactagataatgttattaatgttagaatttagtaagtttaacattgttatgagtctattaacagttagttattagtcttgagtttactgttttagattaagataagtattttaccatgtttttagaattaacaccagggttgagggtttaaaagtattctgttagatcattatttagtggttttcaagttagattaagtattttacagtactttaagtatttgattttgtgttttagaaagttactgtttccgatgttagatttgattgttattttactatgtttgactgttttaacctgtttttagaccctagagttgagtagtttttagtagtaagttgagtcttttcagttgtttttggaaactagagttgagtagttttagagtattttgagtgttttttagaaagttactattcaataagttagtattttagatcttagttttgattgttttagagtgttatagattagagttttactttgtttgagttgagtgttttacgttgtttttagtacttttgttttggagtagatttatgtgttttagatttgttattgttacattttgatcataggtttgagtgttttaaatttgagtgttataattgttacatttttgatcataaagttgagggtttgaagtgtgttttttagaaagttactatttaataagttagtatttcagatgttagttttcagtttttgagtgtttttataatgttttaagcttatttagaccctagagttgatggtttagattattgtttaactaggttggagtatttttcagtagtaagtttttgtaaatcagtattttgccttttcgatttgagtgttttagattaagttgttttctgtgtttttacagtattttcagttgttttagaccctagacttcggtggtttttagagtatttctacttaagtgtttagaccccacagtagattagtctttttgaccatcaagttaagggtttagtattatccccacaagtattttagattctttaggacattaggttttagggttttagggttttagggttttagggtttagggtttagggtttagggtttagggttttagggttttagggttttagggttttagggttctagggtcttagggttttagggtttagggtttagggttttagggtttagggttttagggtttagggttttagggttttagggttttagggtttagggttttaggttttagggtttagggtttagggtttagggtttagggttttagggtttaagggttttagggttttagggtttagggtttagggttttagggttttagggttaagggtttagggtttagggttttagggtttagggtttagggtttagggttttagggttttagggtttttagggttttagggttttagggttttagggttttagggttttaggggtttttgggttt

SEQ ID NO: 75 - DNA, 41585 bp, Theileria parva
taaactgataccaggttttggtggtttcttcaatcccgtgtctcctacatgtaattggggagccaaaaatgaactaccctggatacctggagtaccattaggccaaggataccactggcacctaactgacctagtgattcccaccatgatcattttagcctatttatttatttactcactgcattacagagactcatcagttgccagatcaatcatcaaccaacccaaaatgtctacatgtctaaccattctattctatatgtgtcatgagatctcattggctgtaggatttccaggtatctttggtggtaatggaggtggtagcatcctagccctaacggcacagttgatgggtgcatttctgatgtgtctgttagctccatattctgaaggttacattattgagtataagagacatgatcctagcaattggcctacagcaggaatgactaggtggaatgcccttaggtactggaccaaaatggcctcaaagaactgcaataagaacctagcagcattgttcaccaaggacctgagaagagacctgctactatgcatagaaagaaatgagctaatctaacactaatggagggagtatgtaatctaacaaaagagtaagagatagtaagagagtatttaatgtaatgtaataagataatgtaatgtaatctaatactagtaagtggtaatctaacaccagagtaagatataatgtaatagtaagagataatgtggtaatataatctagtaagagagtatgtaataagataatgtaatgtaataaagtgaatgatatgtgatagttagatactaataagatactaaaggatactaataagatactaaaagatagtaataagatagttagagaatgtaatatgtaatacctaaataaaatgtgatacctaaaggtaaatagctaggtagatagttaaactaaaactagtaagataagactgaaaccaataccgatctagggccactgaggtagtaaaagctatcatacagggtctcaatgaaaaggttgacagactctccgaagctgtggtagctaaagttgaacaggctctcaaatcagctcaagctcaacaagatcctgtcaatcttgatctcaccgaaaccatccaagctgtcctcaatgctgctaatggtctctccactaaagccgatgccgtcaaaacccaactcgaagaacatcttgaaatcactaatatccaatctggtgttcctaaatctcaagtcactgaagccctcgaaaccctcactgatcctgctaaaagacaagctgccgtcgccgaagtcaaaggagctctcggtggtaccactgccaatgataccgccaaaattgaggacaaagatctcaccgatcctgccacagaagctctcaaatctgtcaaactcgacggtcaggccgatgcagtcaaaactaaactcacagatcaagttactggccaaacccaaataaatatcggcgattcaattacagcagccctcggaaaacttgaacaacttaaatctggtactactggtgaaaaagaacccaaacctgaggccgtccaagatgtccaatccgctctctctcaaggtactgccaaaacccaattcactagtctatggcacattaagggcactgatggctacagtagtctagatagtgcccattggtacattatgtttccatttcttatggtcctggttggtatgggtctggtctactgcatatatcctgccatagctcctggaatgattgttccattttacctcattgataagattgagatggttctgttgatagccaccatatttccagctctgtatgtagcaattgccagaagtggtaaactgataccaggttttggtggtttctcaagtgcatgggctccaactacgaaatggtcaggtgagactactcttaactggggtcaaacatggaactatgatcctaacaattttagtttcctatggcacattactgacctcgtgattcctaccatgatcattttagcctatttatttatttactcactgcattacagagactcatcagttgccagatcaatcatcaaccaacccaaaatgtctacatgtctaaccattctattctatatgtgtcatgagatctcattggctgtaggatttccaggtatctttggtggtaatggaggtggtagcatcctagcccttacggcacagctgataggtgcatttctgatgtgtctgttagctccatattctgaaggttacattattgagtataagagacatgatcctagcaattggcctacagcaggaatgactaggtggaatgcccttaggtactggaccaaacaggcctccaagaactgcaataagaacctagcagcattgttcaccaaggacctgagaagagacctgttactatgcatagaaagaaatgagctaatctaacaaaagttaaagtaatctaatactaatggagggagaatgtaatctaacaaagtggtaatctaacaccagagtaagagtatgatgtaatctaataaagcttaatgtaataaagtaaagtgataatgtaatgtaataaagtgaagagtatgtggtagatagataaaggaagtagataaagtactggtagataaagtagtaaaaagtgaaagagctttggtgtcttccagcattcgttgtggcagacggtatagaacatggagctaaactggcagtagaaacagacatattcggcaaaacctacacatataaaaaagacggtgacgccaaagaagccactgacaacaaggaactaaaacgcaataccgttgtctatccttccatagctgtccagtggcttaatttcataacctacttgatacttcttttagtctatgtacctggagacagaggtcatctaacagccttctactttgtgattgcagtttctggattcgtgtttggtctcagtaatgtgttgacgtttgctattgatgataattatttacccatctacatagctggagaaaactcatttccagtcctcacttctctgatccactacctgtcatccctaatgtttggtaacagaaggaagtggaacagtgacttcctgatggtctacatagaccttgtggtagccattttactgtcactcctatcagctgtcatgtggaccttaggatatgtttcaaagcatccaacagaagatgacgctctcaaatctaaggccactgaggtagtaaaagctatcatacagggtctcaatgaaaaggtcgacagactctccgaagctgtggtagctaaagttgaacaggctctcaaatcagctcaagctcaagatcaaggtaatgtcacagttaatctcaccaaaaccatccaagctgtcctcaatgctgctaatggtctccaaggtcaagtccaaagcgtcaaagaagctctcgaatcacatcttagtatcactcctggtaatggtgttcctaaatctcaagtcactgaagccctcgaaaccctcactgatcctgctaaaaaacaagctgccatcgacatagtcaaaggagctctcggtggtaccactgccaatgataccgccaaagtagaggacactgatcttcaaggaccggccacaaaagctctcaaatctgtcaaactccaaaatcaggcaggtgcagtcaaaactaatctcaaatctggtggtagtggtaaaacccaaataaatatcggcgattcaatcactcaagccctcacaaaacttgaacaaaataaacctggtactactactggtgaaaaagaacccaaacctgaagccatcgctgacgtcaaatccgctctctctcaaggtactgataaagatccatacatccagctatggcacattaagggcactgatggctacagtagtctagatagtgcccattggtacattatgtttccatttctcatggtcctggttggtatgggtctggtcttctgcatatatcctgccatagctcctggaatgattgttccattttacctcattgataagattgagatggttctgttgatagctaccatatttccagctctgtatgtagcaattgccagaagtggtaaactgatacaaggttttggtggtttctttgatcccgtgtctcctacatgtaattggggagccaccaataaacaaccttggaatcctggagtaaatttgggccaaggataccactggcacctgactgacctagtgattcccaccatgatcattttagcctatttatttatttactcactgcattacagagactcatcagttgccagatcaatcatcaaccaacccaaaatgtctacatgtctaaccattctattctatatgtgtcatgagatctcattggctgtaggatttccaggtatctttggtggtaatggaggtggtagcatcttagccctaacggcacagttgatgggtgcatttctgatgtgtctgttagctccatattctgaaggttacattattgagtataagagacatgatcctagcaattggcctacagcaggaatgactaggtggaatgcccttaggtactggaccaaaatggcctcaaagaactgcaataagaacctagcagcattgttcaccaaggacctgagaagagacctgctactctgcatagaaagaaatgagctaatctaacaaagtaaaagaaataaagagagtatgtaataaaagagtaagagattatgtaatacaagagtaagagagataatctaacactaacaaagagataatgtaatgtaatagtaatgtaataataaagtgaatgatatgtggtagataataataaagtaaatagctaggtaattagttaatgtaaaagtaagataactgaaaccaataccaaagtaagtagtaagctaactgaaactaatactaaactagtaagtagataactaaaactaaacaaaagaaactagtaagctaactgaaaccaatactaaactaatctgatacctaatcaaatacctaactaaactggaatgtggtaaatagatgatacaaacctgttcaccaaggacctgagaagagacctgttactctgcatagaaagaaatgaactaatctaacgaagtgataatgtaacacaaagtagtaagagagtaatgtaatgtaatactagagaaagagagaatgtaatgcctaaaagtatgtagtaaggtagatagttaaactaaaagtaagctaactgaaaccaatactaatccaatactaatctgatactaatctaatactaatctaatactaaactaatactaaactaatctggaatgtggtaaatagataatgctaacccgttgtcaaggacctgagaagagacctgttactctgcatagaaagaaatgagctaatctaacactagagtaaaagataatctaacaaagtaagagtgaatctaacacaaagtaagagtgaatctaacacaaagtaagagagtatgtaagaatgtaataatgtaaagtaataagatagtaatagatactaaaggatactaataagacagtaataagacagtaataagacactaataagatagtaatagatactaaaggatagtaataagatagtaataagatagtaataagatactaaaaagaaagaaatgagctaatctaacagagtgatactaaagtaagagtgtaagtaatgtggtagattagtaagtaatgtagtaaggctgtaatgtaaagtgttaatgtaatactagagtaagagttaatgtaatgtaaagtgataatctaatactagagtaagagataatgtaatgtaaagagataatctaatactagagtaagagatatgtgatagtaagagagtatataatctaacaaaagagtaagagtaagagtaataagatactaatgtaatgtaataagactaatgtaatctaataaagtggtaatgtaatggagtaatgtaatctagtaaagaggtaatgtaatactagagtaagagagtatgtggtagatacaaagtaagtagctaggtaaatagttaaagtaagattagaaagataactgaaaccaataagaagtaagaagctaaccaaagccaatactaaactaaagtaagaagataagactgaaaccaataccgatctaaggccactgaaatagtaaccaagatcataaagggtctcaatggtaaggttgacagactcgcctctgaggtggtagataaagttgaacaggctctcaaacaggctctccaatctcaacctcaacctgaaggtcaaggtgataaagtcacaactaatctcgacagtcccatcagtaatgtcctcaccgataataatggtctcaccactctagtccaaaacgtcaaagaagctctcgaaaaacatcttgaaatcactaatatccaaggtggtgttgataaatctgcagtccaggcagccatccaaaacctccaatctaaaagacaagctgccgtcgccgaagtcaaaggagccctcggtgccagtcacaatgatgaagccaaaattgaggacactgatcttcaaggaccggccacagaagctctcaaatctgtcaaactagaagctcaggcaggtgcagtcaaaactaatctcaaatctggtggtagtggtaaaacccaaataaatatcggcgattcaatcacagcagccctcggaaaacttgaacaacttaaatctggtactactggtgaaaaagaacccaaacctgatgccctcgctgatgtcaaagaagcactctcagctggtgattctggtgccaaaaccgaattcgttagtctgttccacattaagggcactgatggctacagtagtctagatagtgcccattggtacattatgtttccatttcttatggtccttgtaggaatgggtctagtctactgcatatatccagccatagctcctggaatgattgttccattttacctcattgataagattgagatggttctgttgatagccaccatatttccagctctgtatgtggcaattgccagaagtggtaaactgataccaggttttggtggtttctttgatcccgtgtctcctacatgtaattggggagccaccaataaacctgtttggctacctggagtaccattaggccaaggataccactggcacctaactgacctagtgattcccaccatgatcattttagcctatttatttatttactcactgcattacagagactcatcagttgccagatcaatcatcaaccaacccaaaatgtctacatgtctaaccattctattctatatgtgtcatgagatctcattggctgtaggatttccaggtatctttggtggtaatggaggtggtagcatcctggccctaacggctcagctgataggtgcatttctgatgtgtctgttagctccatattctgaaggttacattattgagtataagagacatgatcctagcaattggcctacagcaggaatgactaggtggaatgcccttaggtactggaccaaacaggcctcaaagaactgcaataagaacctagcagcattgttcaccaaggacctgagaagagacctgttactctgcatagaaagaaatgagctaatctaacaaagtggtaatctaacactagagttagagagttaatgtaatagtaagagagaatgtagtgatgtaataagacaatgtaatgtaatgtaataaagcttaatgtaataaagtgatgagtatgtggtagctagatacaaagtaagtagctaggtaaatagttaaagtaagattagaaagataactgaaaccaataagaagtaagaagctaaccaaagccaatactaaactaaagtaagaagataagactgaaaccaataccgatctagggccactgaggtagtaaaagctatcatacagggtctcaatggtaaggttgacaaactcgccaaagctgtagtaactaaggtcatagctgctctcaaagaagatgaagctgctgatggtaaagttgatgaagaaactcatctcacaactcccaccacaactgtcctcactaaagtcaatctccaatctcaactccaagaagttgtcgaagctctcaaaggacaaattagctttgtggaaggtggtactactcaagtctctgcagctctcaatgcacttcgaactagtactagtaatgatcaacccaaacaagatgccatcaacgcagtcaaaaccccactcaaagccactcttgttcaatccaccagagatatcaccgaacctgcaacaaatgttctcactaaggtcaaactccaagctcaggccactcaaattcccacagctctaactaaagtcagtattaccaatgatcaaactctaatagcccaagccatcaacatactcacagaaaatgctactaaaactaatgccatcgaccaagtccaaaaaaaactcaaagctgataatgccagagcccaattcattagtctattccacattaagggcactgatggctacagtagtctaaataatgctgagtggtacattatgtttccatttctcatggtcctagttggcatgggacttgtctactgcatatatcctgccatagctcctggaatgattgttccattttacctcgtggataagattgagatggttctgttgatagctaccatatttccagctctgtatgtagcaattgccagaagtggtaaactgataccaggttttggtggtttctttgatcccgtgtctcctacatgtaattggggagccaccaataaacctgtttggctaccaagtgatttaggcactggataccactggcacctaactgacctagtgattcccaccatgatcattttagcctatttatttatttactcactgcattacagagactcatcagttgccagatcaatcatcaaccaacccaaaatgtctacatgtctaaccattctattctatatgtgtcatgagatctcattggctgtaggatttccaggtatctttggtggtaatggaggtggtagcatcctagcccttacggctcagctgatgggagcatttctgatgtgtctgttagctccatattctgaaggttacattattgagtataagagacatgatcctagcaattggcctacagcaggaatgactaggtggaatgcccttaggtactggaccaaacaggcctcaaagaactgcaataagaacctagcagcattgttcaccaaggacctgagaagagacctgttactctgcatagaaagaaatgaactaatctaacgaagtgataatgtaacacaaagtagtaagagagtaatgtaatgtaatactagagaaagagagaatgtaatgcctaaaagtatgtagtaaggtagatagttaaactaaaagtaagctaactgaaaccaatactaatccaatactaatctgatactaatctaatactaatctaatactaaactaatactaaactaatctggaatgtggtaaatagataatgctaacccgttgtcaaggacctgagaagagacctgttactctgcatagaaagaaatgagctaatctaacactagagtaaaagataatctaacaaagtaagagtgaatctaacacaaagtaagagtgaatctaacacaaagtaagagagtatgtaagaatgtaataatgtaaagtaataagatagtaatagatactaaaggatactaataagacagtaataagacagtaataagacactaataagatagtaatagatactaaaggatagtaataagatagtaataagatagtaataagatactaaaaagaaagaaatgagctaatctaacagagtgatactaaagtaagagtgtaagtaatgtggtagattagtaagtaatgtagtaaggctgtaatgtaaagtgttaatgtaatactagagtaagagttaatgtaatgtaaagtgataatctaatactagagtaagagataatgtaatgtaaagagataatctaatactagagtaagagataatgtaatgtaaagtgataatctaatactagagtaagagataatgtaatgtaaagagataatctaatactagagtaagagatatgtgatagtaagagagtatataatctaacaaaagagtaagagtaagagtaataagatactaatgtaatgtaataagactaatgtaatctaataaagtggtaatgtaatggagtaatgtaatctagtaaagaggtaatgtaatactagagtaagagagtatgtggtagatacaaagtaagtagctaggtaaatagttaaagtaagattagaaagataactgaaaccaataagaagtaagaagctaaccaaagccaatactaaactaaagtaagaagataagactgaaaccaataccgatctagggccactgaggtagtaaaagctatcatacagggtctcaatggtaaggttgacaaactcgccacagctgtggtagctaaagttgaacaggctctcaaatcagctcaagctcaacctcaagatcaaggtaatgtcacagttaatctcaccactaacatcagtggagtcctcaatgctgctaatggtctctccggtcaagtccaagacgtcaaaacccaactcgaagaacatcttgaaatcactaatatccaatctggtgttcctaaatctcaagtcactgaagccctcgaaaccctcactgatcctgctaaaagacaagctgccgtcgccgaagtcaaaggagccctcggtgccagtcacaatgatgaagccaaaattgaggacaaagatctcaccgatcctgccacagaagctctcaaatctgtcaaactcgacggtcaggcaggtgcagtcaaaactaaactcacagatcaagttactggccaaacccaaatcaataccagtgccgattcaattacagcagccctcggaaaacttgaacaacttaaatctggtactactggtgaaaaagaacccaaagatgatgccctcgctgatgtcaaagaagcactctcagaatctggtgattctggtgccaaaaccgaattcattagtctgttccacattaagggcactgatggctacagtagtctagatagtgcccattggtacattatgtttccattccttatggtcctagttggcatgggacttgtctactgcatatatcctgccatagctcctggaatgattgttccattctacctgattgataagattgagatggtactgttgatcatgaccatatttccagctctgtatgtggcaattgccagaagtggtaaattgataccaggttttggtggtttcttcaatcccgtgtctcctacatgtaattggggagccaaaaatgaactaccctggatacctggagtaccattaggccaaggataccactggcacctgactgacctagtgattcccacaatgatcattttagcctatttatttatttactcactgcattacagagactcatcagttgccagatcaatcatcaaccaacccaaaatgtctacatgtctaaccattctattctatatgtgtcatgagatctcattggctgtaggatttccaggtatctttggtggtaatggaggtggtagcatcctagcccttacggcacagctgataggtgcatttctgatgtgtctgttagctccatattctgaaggttacattattgagtataagagacatgatcctagcaattggcctacagcaggaatgactaggtggaatgcccttaggtactggaccaaacaggcctccaagaactgcaataagaacctagcagcattgttcaccaaggacctgagaagagacctgttactatgcatagaaagaaatgagctaatctaacaaaagagtaatctaacactagagttagagagttaatgtaataagaatgataaatgtaatgatgtaataagataatgtaatctagtaaagcttaatgtaataaaagagagtatgtggtaaatagatataaagtatgtagctaggtagatagttaaactaaagtaagaagataactgaaaccaatactataccaagtagtaagataagactgaaaccgataaagactagaactgaaaccaatactaatactaaggtagaagataactgaaactaataccaatctaaggccaccaaggtagtaaagacagtgatagcaaatctcaaagcagctcaagctcctagtactgctaaagttaatgtagctactcatatccaaacacctactcgagaagctctcaaagacactggtctagataaccaagccactgccattgccgctgctttcacagaaccagaatcatctggaactggacttaatattcaagataatagtactcaaatcactgcagctctccaattactcgaagatgaaggtaaacccaaacatgatgccatcgatgcagtccaagccaaaattgaagccgctgttgccaaagctgtagtaactaaggtcatagctgctctcaaagaagatgaagctgctgatggtaaagttgatgaagaaactcatctcacaactcccaccacaactgtcctcactaaagtcaatctccaatctcaactccaagaagttgtcgaagctctcaaaggacaaattagctttgtggaaggtggtactactcaagtctctgcagctctcaatgcacttcgaactagtactagtaatgatcaacccaaacaagatgccatcaacgcagtcaaaaccccactcaaagccactcttgttcaatccaccagagatatcaccgaacctgcaacaaatgttctctcaaaggtcaaactccaagctcaggccactcaaattcccacagctctaactaaagtcagtattcgagctgatactactctaatagcccaagccatcaacaaactcacagaaaatgctactaaaactaatgccatcgaccaagtccaaaaaaaactcaaagctgataatgccagagcccaattcattagtctattccacattaagggcactgatggctacagtagtctaaataatgctgagtggtacattatgtttccatttctcatggtcctagttggcatgggacttgtctactgcatatatcctgccatagctcctggaatgattgttccattttacctcgtggataagattgagatggttctgttgatagctaccatatttccagctctgtatgtagcaattgccagaagtggtaaactgataccaggttttggtggtttctttgatcccgtgtctcctacatgtaattggggagccaccaataaacctgtttggctaccaagtgatttaggcactggataccactggcacctaactgacctagtgattcccaccatgatcattttagcctatttatttatttactcactgcattacagagactcatcagttgccagatcaatcatcaaccaacccaaaatgtctacatgtctaaccattctattctatatgtgtcatgagatctcattggctgtaggatttccaggtatctttggtggtaatggaggtggtagcatcttagccctaacggcacagttgatgggtgcatttctgatgtgtctgttagctccatattctgaaggttacattattgagtataagagacatgatcctagcaattggcctacagcaggaatgactaggtggaatgcccttaggtactggaccaaacaggcctccaagaactgcaataagaacctagcagcattgttcaccaaggacctgagaagagacctgttactatgcatagaaagaaatgagctaatctaacaaaagagtaatctaacactagagttagagagttaatgtaataagaatgataaatgtaatgatgtaataagataatgtaatctagtaaagcttaatgtaataaaagagagtatgtggtaaatagatataaagtatgtagctaggtagatagttaaactaaagtaagaagataactgaaaccaatactataccaagtagtaagataagactgaaaccgatactaatactatactaatctgatactaaacctaatacctaactaatctggaatgtggtaaatagctaatgctaaactgttcaccaaggacctgagaagagacctgttactctgcatagaaagaaatgagctaatctaacaaagagataatctaacaaaaaagtaatagagtaggagatgatgtaatctaataccagagtaagagatagtaagagagaatgtaatgtaaagtgatagtaagtggtaatagtaatagtgaaagaaatgaactaatgtaataaaagagtaagagattatgtaatacaagagtaagagagataatctaatactagagtaagagagaatgtaatgtgataatctaataaagcttaatgtaataaagtgaagagtatgtggtagatagataccaatagatagtaatacactgatgatgataatggtggctgacggtatagaacatggagctaaactggcagtagaaacagacatattcggcaaaacctacacatataaaaaagacggtgacgccaaagaagccactgacaacaaggaactaaaacgcaataccgttgtctatccttccatagctgtccagtggcttaatttcataacctacttgatacttcttttagtctatgtacctggagacagaggtcatctaacagccttctactttgtgattgcagtttctggattcgtgtttggtctcagtaatgtgttgacgtttgctattgatgataattatttacccatctacatagctggagaaaactcatttccagtcctcacttctctgatccactacctgtcatccctaatgtttggtaacagaaggaagtggaacagtgacttcctgatggtctacatagaccttgtggtagccattttactgtcactcctatcagctgtcatgtggaccttaggatatgtttcaaagcatccaacagaagatgacgctctcaaatctaaggccactgaggtagtaaataagatcatacaacatctcaatgaaaaggtcgacagactctccgaagctgtggtaactgcagttgaacaggctctcaaacaagctctccaacctctagctcaacctcaagatcaaggtaatgtcacagttaatctcaccactaacatcagtgaagtcctcaaaacagatactggtctcaacagtcaagcccctggcgtcaaaactaaactcgaatcgcatcttggtatcactcctggtaatggtgttgctcaagctgtggtcactgaagccctcgaaaccctcactgatcctgctaaaaaacaagctgccgtcgacatagtcaaaggagctctcggtggtaccactgccaatgataccgccaaagtagaggacactgatcttcaaggaccggccacagaagctctcaaaactgtcaaactccaaaatcaggcaggtgcagtcaaaactaaactcacagatcaagttactggccaaacccaaatcaataccagtgccgattcaatcacagcagccctcggaaaacttgaacaacttaaatctggtactactggtgaaaaagaacccaaagatgatgccctcgctgatgtcaaagaagcactctcagaatctggtgattctggtgccaaaaccgaattcgttagtctatggcacattaagggcactgatggctacagtagtctagatggtgcccagtggtacattatgtttccattcctcatggtccttgtaggaatgggtctggtctactgcatatatcctgccatagctcctggaatgattgttccattttacctcattgataagattgagatggttctgttgatagctaccatatttccagctctgtatgtagcaattgccagaagtggtaaactgatacaaggttttggtggtttctttgatcccgtgtctcctacatgtaattggggagccaccaataaacctgtttggctaccaagtgatttaggcactggataccactggcacctaactgacctagtgattcccaccatgatcattttagcctatttatttatttactcactgcattacagagactcatcagttgccagatcaatcatcaaccaacccaaaatgtctacatgtctaaccattctattctatatgtgtcatgagatctcattggctgtaggatttccaggtatctttggtggtaatggaggtggtagcatcctagcccttacggcacagctgataggtgcatttctgatgtgtctgttagctccatattctgaaggttacattattgagtataagagacatgatcctagcaattggcctacagcaggaatgactaggtggaatgcccttaggtactggaccaaaatggcctccaagaactgcaataagaacctagcagcattgttcaccaaagacctgagaagagacctgttactctgcatagaaagaaatgagctaatctaacaaagtggtaatctaacactagagttagagagttaatgtaataagaatgataaatgtaatgatgtaataagataatgtaatctagtaaagcttaatgtaataaaagagagtatgtggtaaatagatataaagtatgtagctaggtagatagttaaactaaagtaagaagataactgaaaccaatactataccaagtagtaagataagactgaaaccgataaagactagaactgaaaccaatactaatactaaggtagaagataactgaaactaataccaatctaaggccaccaaggtagtaaagacagtgatagcagctcttaaagaatctcaatctcaatctagtagtcctactactaatgttaatacatctacttatatccaagatcctactcaacaggctctccaaaacactggtctagatgccgaagtcgcagaagttatcaaagctttcacagaaggaccaccagctggacttgatattaaagatcaaaatgaaatctctgcagctctcggaaaactcgaaactggtggacaacccaaacatgatgccattgatgcagtccaagccaaaattgaagaagctgttgccaaagctattgtaaaggccgtcatagcagctctcaataaagctgctagtgctggtaatgttaatccagaaactcatctccaaactcccaccacaactgtcctcaccaaggtcaaactccaatcccaactcggagaagttgtcgcagcactcaaacaaaaaattagcttttcagaaggtactactcaagtcactaatgctctcacagcacttaaagaaactattagtgatgatcccaaacaagatgccatcggtgcagtcaaaaccccactcaaagccactactgttcaggccgctagagatctaaccggtcctgccacagatgttctccagaaggtcaaactccaaggacaggccggtcaaattcctcaagctctccaacatgtcagtattagagctgatactactaaaatagctgcagccatcaacacactcactactcaaaaaactactgccatcgaccaagtccaaaaaaaactcaaagctgatagttctgatgccaaagcccaattcgttagtctgttccacattaagggcactgatggctacagtagtctagatagtgcccattggtacattatgtttccatttcttatggtcctggttggtatgggactggtcttctgcatatatccagccatagctcctggaatgattgttccattttacctagtggataagattgagatggttctgttgatcatgaccatatttccagctctgtatgtagcaattgccagaagtggtaaactgatacaaggttttggtggtttcttcaatcccgtgtctcctacatgtaattggggagccaaaaatgaacctgtttggctaccaagtgatttaggctcaggataccactggcacctaactgacctagtgattcccacaatgatcattttagcctatttatttatttactcactgcattacagagactcatcagttgccagatcaatcatcaaccaacccaaaatgtctacatgtctaaccattctattctatatgtgtcatgagatctcattggctgtaggatttccaggtatctttggtggtaatggaggtggtagcatcctagcccttacggcacagctgataggtgcatttctgatgtgtctgttagctccatattctgaaggttacattattgagtataagagacatgatcctagcaattggcctacagcaggaatgactaggtggaatgcccttaggtactggaccaaaatggcctccaagaactgcaataagaacctagcagcattgttcaccaaagacctgagaagagacctgttactctgcatagaaagaaatgagctaatctaacaaagtaaaagaaataaagagagtatgtaataaaagagtaagagattatgtaatacaagagtaagagagataatctaacactaacaaagagataatgtaatgtaatagtaatgtaataataaagtgaatgatatgtggtagataataataaagtaaatagctaggtaattagttaatgtaaaagtaagataactgaaaccaataccaaagtaagtagtaagctaactgaaactaatactaaactagtaagtagataactgaaactaaacaaaagaaactagtaagctaactgaaaccaatactaaactaatctgatacctaatcaaatacctaactaaactggaatgtggtaaatagatgatacaaacctgttcaccaaggacctgagaagagacctgttactctgcatagaaagaaatgaactaatctaacgaagtgataatgtaacacaaagtagtaagagagtaatgtaatgtaatactagagaaagagagaatgtaatgcctaaaagtatgtagtaaggtagatagttaaactaaaagtaagctaactgaaaccaatactaatccaatactaatctgatactaatctaatactaatctaatactaaactaatactaaactaatctggaatgtggtaaatagataatgctaacccgttgtcaaggacctgagaagagacctgttactctgcatagaaagaaatgagctaatctaacactagagtaaaagataatctaacaaagtaagagtgaatctaacacaaagtaagagtgaatctaacacaaagtaagagagtatgtaagaatgtaataatgtaaagtaataagatagtaatagatactaaaggatactaataagacagtaataagacagtaataagacactaataagatagtaatagatactaaaggatagtaataagatagtaataagatagtaataagatactaaaaagaaagaaatgagctaatctaacagagtgatactaaagtaagagtgtaagtaatgtggtagattagtaagtaatgtagtaaggctgtaatgtaaagtgttaatgtaatactagagtaagagttaatgtaatgtaaagtgataatctaatactagagtaagagataatgtaatgtaaagagataatctaatactagagtaagagataatgtaatgtaaagtgataatctaatactagagtaagagataatgtaatgtaaagagataatctaatactagagtaagagatatgtgatagtaagagagtatataatctaacaaaagagtaagagtaagagtaataagatactaatgtaatgtaataagactaatgtaatctaataaagtggtaatgtaatggagtaatgtaatctagtaaagaggtaatgtaatactagagtaagagagtatgtggtagatacaaagtaagtagctaggtaaatagttaaagtaagattagaaagataactgaaaccaataagaagtaagaagctaaccaaagccaatactaaactaaagtaagaagataagactgaaaccaataccgatctagggccactgaggtagtaaaagctatcatacagggtctcaatggtaaggttgacaaactcgccacagctgtggtagctaaagttgaacaggctctcaaatcagctcaagctcaacaagatcctgtcaatcttgatctcaccgaaaccatccaagctgtcctcaatgctgctaatggtctctccggtcaagtccaagacgtcaaaacccaactcgaagaacatcttgaaatcactaatatccaatctggtgttcctaaatctcaagtcactgaagccctcgaaaccctcactgatcctgctaaaagacaagctgccgtcgccgaagtcaaaggagccctcggtgccagtcacaatgatgaagccaaaattgaggacaaagatctcaccgatcctgccacagaagctctcaaatctgtcaaactcgacggtcaggccgatgcagtcaaaactaaactcacaactactggccaaaccagaatcagaactggcagcagcggtggcgattcaatcaatacagctctcggaaaactccaaacatcaaataaaggtgatgccatccaagacgtccaatccgcactctcagctggtgattctggtgccaaaactaaattcgttagtctatggcacattaagggcactgatggctacagtagtctagataatgcccattggtacattatgtttccattcctcatggtcctggttggtatgggtctggtcttctgcatatatcctgccatagctccgggaatgattgttccattttacctcattgataagattgagatggtactgttgatcattaccatatttccagctctgtatgtggcaattgccagaagtggtaaactgatacaaggttttggtggtttcttcaatcccgtgtctcctacatgtaattggggagccaaaaatgaactaccctggatacctggagtaccattaggccaaggataccactggcacctgactgacctagtgattcccacaatgatcattttagcctatttatttatttactcactgcattacagagactcatcagttgccagatcaatcatcaaccaacccaaaatgtctacatgtctaaccattctattctatatgtgtcatgagatctcattggctgtaggatttccaggtatctttggtggtaatggaggtggtagcatcctagcccttacggctcagctgatgggagcatttctgatgtgtctgttagctccatattctgaaggttacattattgagtataagagacatgatcctagcaattggcctacagcaggaatgactaggtggaatgcccttaggtactggaccaaacaggcctcaaagaactgcaataagaacctagcagcattgttcaccaaggacctgagaagagacctgttactctgcatagaaagaaatgagctaatctaacaaaagttaaagtaataatgtaatgtaatctaataccagagtaagagagtatgtggtaatgtaatagtaagagataatgtaatctaatactagagtaagagtgaatgtaatactgtagtagtaatgtaatgtaaagtgataatgtaatatgtaatgagatgtaatactgtagtagtaatctaataataatgtaatgagtatgtgatagatagatgtagagtgtgtgataaatagaaagtatgtgatagatagatgtagagtgtgtgataaatagaaagtatgtgatagatagatactaataagatactaataagatactaaaggatactaaaggatactaaaggatagtaataagatactaataagatactaataagatactaaaagatagtaataagatagttagagaatgtaatatgtaatacctaaaagtaggtagcaaggtaaatagttaaactaaagaaataagataactgaaaccaatactaaagtagaagataactgaaaccaataactaataagaagtaacttaagactactaaggtagtaatggtactaggtagtagtcagatacttgcccactatgagaccctaatacccgcctcagcccacgcactcaaaaaggaagcatcaaatctatcccaaaaggccggagaactatccactaaggccctagcactcaaaaatggagtcgaagctaataatgctgaagccgctaaggttctgaaggccaaggctggcaaagaacaagaggaaggcaagttgaggaaactggcagaaactcttcacaccgcggcccatgccctacacaatgcagtaggtggtaaagatagtagtaaggccagcggtctggccgctgcagtaggcgccgatgaaaccagtgatactggtaaactccgatccaacctaaagacactcgccgaagctactggtactggtactggtctaactggttcggcccaggctgtcacggaccaatacacccaagtagaaagtaaattcagcgatgtccagactcaaaatacttcacaaaaatacgacagttaccaatctaagtacaaagccgtagtggatgcctgggaagccttcaatgcagtatataaggctgaagataatctctacaacgccctcaacagtggtagtgttgccagcaatctacaacaatcactgtccgaactcagtagtgccaatgctggagatttcctagatgtatgctctcaggcctctgatgcactcaaaaagtacaacgccctaacggaggccatcgaaaaaccctatgacaagttagaggctgtcaagaagttcgaaaccgcgtacaaaagcacaacaggcaatatcaaaaccaattacgaatccattgtcaataacctcacagatctcaagaatgggttcactgacgcacttcgtatcaataagttttggataatagtttggccatcagtcatagcccagtggcttaatttcttaacatacttgatacttcttattgtctatgttcctggagacagtggtcatctaacaatgttctactgggtgattgctatatctggatttgtgtttggtttctgcaacgtcactgtgtttgctattgatgttaattatttgcccatctacatagctggagaaaattgttttccagctaccacttctctgatccactacctaagtagtctgatgtttggtaacagaaggaagtggaacagtgactttctgatggtctacatagacctagtggtagccatcctgatatcctttgcagctgctgccatgtggaccttagcctatctgtcaagtcacgcaaagaaacaagataaatctactcctgattttttttggcacattaatcctccaggtggctaccaaggcgaaattgttgatcctaaaacctttatgccattcctcatggtccttgtcggaatgggactggtctactgcatatatccagccatagctccgggaatgattgttccattttacctcgtggataagattgagatggttctgttgatagctaccatatttccacctctcattgtagccatagttaccaaatacaagtttggctggtcacctaaggcagcatggacagacaactctaaagatttttttcctggttctccatgtaactatatgtggcatttctttgacctagtgattcctaccatgatcattttagcctatttatttatttactcactgcattacagagactcatcagttgccagatcaatcatcaatcaacccaaaatgtctacatgtctaaccattctattctatatgtgtcatgagatctcattggctgtaggatttccaggtatctttggtggtaatggaggtggtagcatattggcccttacggctcagctgataggtgcatttctgatgtgtctgttagctccatattctgaaggttacattattgagtataagagacatgatcctagcaattggcctacagcaggaatgactaggtggaatgcccttaggtactggaccaaaatggcctccaagaactgcaataagaacctagcagcattgttcaccaaggacctgagaagagacctgctactctgcatagaaagaaatgagctaatctaacaaaaagataatctaacactaatggaggtggtatgtaatctaacatagtgataatgtaatgagtatgtgatagatagatgtagagtgtgtaataaatagaaagtatgtggtagatagataccaatagatagtaatacattgatgatgataatggtggctgacggtatagaacatggagctaaactggcagtagaaacaggcatattcggcaaaacctacacatataaaaaagacggtgacgccaaagaagccactgacaacaaggagctaaaacgcaataccgttgtctatccttccatagctgtccagtggcttaatttcataacctacttgatacttcttatagtctatgtacctggagacaaaggtcatctaacagccttttactttgtgattgctgtttctggatttgtgtttggtctcagtaatgtgttgacgtttgctattgatgataattatttacccatctacatagctggagaaaattgttttccagctaccacttctctgatccactacctgtcaaccctaatgtttggtaacagaaggaagtggaacagtgacttcctgatggtctacatagaccttgtggtagccattttgctgtcacttctgtcagctgtactgtggaccttaggatatgtgtcaaagcatccaacagaagaagatgctctcaaaccaaaggccactgaagtagtaaccaagatcatagaaggtctcaatggtaagatcaatagctccgctgaagtggtagaagctatcgtaaaacacctagaatccaaaatagaagaggccggcacaaaaattgaagccatccaagaagtcaaactggccatcgatcaggccatccaaagtgccatccaaagtgcccaagctagaagtggtaccgccacagtcaaagctgtagttcagtcagtcctcgaagccctcaaagcccaagccacccaaatcactgaagcgctcacacctctagacatcacaaatgcagataaagatatctccgatgctatctcaaccactctccctaaactcactaaccttaaccaaacgtatgatcccaaaaaacatgatgccactactatcctcaaagaagcccttgctgttgttgccaaagtcaaggatgaacatctcgacactcccatcaatgaagttctcaataaggtcaatctccaaggccaagccggtcaagtcaaaaataaactccaacaaggtcctaatctgggtatcacagctgatacaacttcaatctctcaagccctccataacctccaagaaaatggaaaacccaaacctgaggccatcgccgcagtcaaacaagccctcgaagccactaatattacagacactgatctcgatacaccaatcggtactgtcctcaccactaagaatggtctccaaggtaaaatccaagcagtcaaaactaatctcaaatctggtggcggtggccaaaccaatatcaatatcggtgccgacacaatcactctagccctcggaaaactccaacaagaaggacaacccaatgctactgccatcgctgacgtacaatccgcactctctcaaggcactgaaaaggacccatacatccagctatggcacattaatcctccaggtggctaccaaggcgaaattgttgatcctaaaacctttatgccattcctcatggtccttgtcggaatgggactggtctactgcatatatccagccatagctccgggaatgattgttccattttacctcgtggataagattgagatggtactgttgatagctaccatatttccacctctcattgtagccatagttaccaaatacaagtttggctggtcacctaaggcagcatggacagacaactctaaagatttttttcctggttctccatgtaactatatgtggcatttctttgacctagtgattcctaccatgatcattttagcctatttatttatttactcactgcattacagagactcatcagttgccagatcaatcatcaaccaacccaaaatgtctacatgtctaaccattctattctatatgtgtcatgagatttcattggctgtaggatttccaggtatctttggtggtaatggaggtggtagcatattggcccttacggctcagctgatgggagcatttctgatgtgtctgttagctccatattctgaaggttacattattgagtataagagacatgatcctagcaattggcctacagcaggaatgactaggtggaatgcccttaggtactggaccaaaatggcctccaagaactgcaataagaacctagcagcattgttcaccaaagacctgagaagagacctgttactctgcatagaaagaaatgagctaatctaacaaagtgataatctaacaaaaaagtagagtaagagagtatatgtaatagtaagagtgaatgtaataatgtaatgtaataagatagtaatgtaatgtgataaagtgaagagtatgtggtagatagatatctataaagtaggtagctaggtaattagttaaagtaactaaagtaaaagaaataagctaactgaaaccaaaactaaccaaactaagataactgaaaccaataccaagtaaaagtaagaagatacctgaaaccaataataatctaaggccactgaagtagtagacgctatcatacagggtctcaacgaaaaggtatccattgccaccaaggtagtaaaagcagtcatagcaaccctcaaagcagctcaagctgaacctagtagtcctactgctactgttaatacagctgatcatatcacagatcctaccacagctgctctcactggcactggtctagataccgcaaccgttgccgatgctttcacagaaccagaatcatctggaacaggacttaatattcaagatcaaagtgaaatcgctgatgctctcctattactagaagctagtggacaacccttacatgatgccatcgatacagtccaagccaaaattgaggaagctgttgccactgctgtagtaactaaagtaatagcagctctcaatggtcaaactagtggtgatgttaatccagaaactcatctccaaactcccaccacaactgtcctctccaaggtcaaactccaatctcaactcaccggcgttgtcgcagcactcaaagcaaaaattagcttttcagaaggtagtactacagtcgaagtctctgcagctctcccaaaactccaacaagatgataatgatcccaaacctgaagtcatcggtgcagtcaaaacccctctcaaagccactactgttcaggccggtagagatctaaccggtcctgccacagatgttctccagaaggtcaaactccaaggacaggccggtcaaattcccaatgctctcctcactgtcggtattacagctaatagtactaaaatagctgcagccatcaacacactcactactcaaaaaactactgccatcaacgctgttaaaaaaaaactcaaacaagatggtgccagagcccaattcattagtctattccaccttaagggcactgatggctacagtagtctagatgatgtcaaatggtacattatgtttccatttctcatggtccttgttggtatgggactggtctactgcatatatccagccatagctcctggaatgattgttccattttacctggttgataagattgagatggttctgttgatcctgaccatatttccagctctgtatgtggccgttgccagaagtggtaaattgatacaaggttttggtggtttctttaatcctgtgtctcctacatgtaattggggagccaaaaatgaagctccatggctaccaagtgatttaggctctggataccactggcacctgactgacctcgtgattcccatcatgatcattttagcatatttatttatttactcactgcattacagagactcatcagttgccagatcaatcatcaaccaacccaaaatgtctacatgtctaaccattctattctatatgtgtcatgagatctcattggctgtaggatttccaggtctactaggaaacagtggattcagtagcatcctagccctcatggctcagctgatgggagcattattcggtttttgaatgatttataactgttaaatagctgtgtggtcagaactagtaatacgagtttgtaatcatttggcttattattagacaattatcaataagtgggatatctttcttggttgtagtggtatagtcatagatttattagtagttaatgatcatcataacttaataagaatttcttgaagatcttaaacttaatcattaatacttttaatgagttaattaatcaatgaatcttctttaaatgtttagttatttgtctttgagtgaaaagacattagatagttttaagattaggtgggtctttggagattattgattcaagagttttgaaacttgatcactaaactgtataacatacatgaaacattcctaatatgtacaattagtgacacatctaaaatatagtagaaaaaaatgtgaaaaaattaaacataacataaaaacagtaaaacagaaaataactttaataacaaactaggtgagaagttactgtttgaaaaataaaaagtaaccaatagcttgattagtcagattcctgaataactgttataattaagagctgacaaaaacttaacactaagtaagatattaacttccagagtccaaaggtagaaactaactcaatcactgagaaagttaacttagtaccattattattaaccagaattagccagtatgtatgacaaagtgttagttatactaatatgtttggaaagaatgatagagattggaactgattaaagatagttataatataaaggtcaaaaactgacactggctgggggaaacctaaaggcatattttaaaaattgggacctgagtaggtatataaggtaataccttaaactatcttagtgttgatagcacatctaagtgttaatatagtaaaagagtatagtggaatgagtgtaaaattatacaaaggaagtttttgtagtttggttgaaggaatcttgttttatccacacaatgtgtaggtaaattcctcattcttatctatgccttaatttattagagtttattagtttgtcgattttttatttttataattctttcacaatattcttgaagctctaaagactatcttctggtgattattctagagtcgacgctcctgggaacttgtttcctttacgattaaagagtttaatatttttaacacttgagtttagagttactttaagaccactttggaattgaatactaactatatcttccagaagattatattgtgaatttttggtcagtctgtatcccaaccgctgcaatagtttagtatcaaagttaaagtcaataacatacttgaactaatttaaatatacaacatatttattactcagttgctggatatagtttaaatcacttcatcttcaaaatagaatcgtaattctctcatgtttagtcttgactctgtaatatgtttccattttccagcattatcccgataaacaatgtgtaattatagtttttacgtaaaattatcaagtatctcatgacacatatagaatagaatggttagacatgtagacattttgggttggttgatgattgatctggcaactgatgagtctctgtaatgcagtgagtaaataaataaataggctaaaatgatcatggtcggaatcacgaggtcaaagaaatgccacagatagttacatggagaaccaggtgcccatggatcaccagagttgtccttccattctgccttaggtgaccagccaaacttgtatttggtaactatggctacaatgagaggtggaaatatggtagctatcaacagaaccatctcaatcttatcaacgaggtaaaatggaacaatcattccaggagctatggcaggatatatgcagtagaccagacccataccaaccaggaccatgaggaatggcataaaggttttaggattaacaatttcaccttggtagccatctggaggattaatgtgccaaaaagtatcagggtcattattagttttatcttctttctttttgtgacttgacagataggctacagtccacatggcagcagctgcaaaggatattaggatggctaccactaggtctatgtagaccatcaggaagtcactgttccacttccttctgttaccaaacattagggatgacaggtagtggatcagagaagtggtagctggaaatgagttttctccagctatgtagatgggcaaataattatcatcaatagcaaacgtcaacacattactgagaccaaacacgaatccagaaacagcaatcacccagtaaaacattgttagatgaccactgtctccaggaacatagacaaacagaagtatcacgtatgttaagaaattaagccactgggctatgactgatggccaaactattatccaaaacttattgatacgaagtgcgtcattgaaggcattcttgagatctgtgtggttatcgacaatttctgtgtaattttgtttgatatcattggtagtgcttttgtaggcggattcgaatttcttgacatcctctagtttttctttgatagccttcgttaggatgttgtatttcttgagtgcttcagaggccttagagcagacatctaatagatcatcttcaggggcactattgagttggttgagtgagctagatagattgctggcagggttggtgagggctgtattcagatgttcttcagccttatagactgcattgaaggcattccaggccttgactaccgctaggtacttgtcttggttattgttgtatgctcttcgtgaatcattttgagtctggacctgttggaatgcctgtgctacttgggcgtattgggattttaccttgccggccggagcagttagatcagtactagcaatggcaagatctacgagagcctttatgagtgagtttcctcctgatgttttgatttcttcccaggtattggctgtgttgaggttattccaatcatctgttgtgaatttggagtagtttaggacggctttggctagtttgtatgcctcatgatcacctgggcctgcttgttggtgaactgcattgtgaagtttattggtagtgtacatgagattccagaccagatgccagagtctaccatcgttacgaccagtgccaatcttggccttcagaaccttggcggcattaggatcactattagctctatctacctcatttttgagtccgttggccttggtggatagttcttgtgccttttgggatagattggcctctttgagtgcataggctgaggcaggtattagcttctcatattggactagtagctgactactacctattaacattactaccttagtagtcttagttacttcttctttagtattggtttcagtcaccttcttctttggtattagttctggtttcagtcatagtcttactcttacttttactttaactagctacctagctatttacttttaggtattacatttccttttagtttagtattacatattacattctctgactatcttattagtatcttattagtatctcttactatcttattgatatcttattagtgtctcttagtatctattagtatcttttagtatctaactaccacatactctttactttattacattacattatcacattacatcacattacattctctcttactctagtattagattacatcttactcttttgttagattagctcatttctttctatgcagagtaacaggtctcttctcaggtccttggtgaacagtttagcattagctatttaccacattccagattagttaggtattaggtttagtatcagattagtattggtttcagttaccttattacttacttttaggtattacattttatttaggtattacatattacattctcttactatcttattaatatctcattactatcctttagtatcttttactgtctatctatcacacattctttactttattacattacattatcacatcacatcatcacttattattacattctaactttactttattacattcactcttgttagattattatcacatcatcactttacattacatcactacattctctcttactctcttactctagtattacattatcactttgttagattatcagtcttattactttacatcattactttacatactctattactcttttgttagattatctttttgttagattagctcattaactctactattacattatctcctactctcttactcttttgttagattagctcatttcttattacattactactctagtattacattacattacatactccctccattagtattagattagctcactaccactactattactacagtattacattctctcttactctagtattagattaactctctaactctagtattagattatctttttacattacattatctctttacgttacagtcttattacatactctcttactagattacattactgtcttattacattacatcatcacattatcactatctctcttactctagtattagattacattatctcttactattacattaccacatactctcttactctggtattagattacattatcttattactttatctttttgttagattagctcatttctttctatgcagagtagcaggtctcttctcaggtccttggtgaacaatgctgctaggttcttattgcagttctttgaggccattttggtccagtacctaagggaattccacctagtcattcctgctgtaggccaattgctaggatcatgtctcttatactcaataatgtaaccttcagaatatggagctaacagacacatcagaaatgcacctatcagctgtgccgtaagggctaatatgctaccacctccattaccaccaaagatacctggaaatcctacagccaatgagatctcatgacacatatagaatagaatggttagacatgtagacattttgggttggttgatgattgatctggcaactgatgagtctctgtaatgcagtgagtaaataaataaataggctaaaatgatcatggtaggaatcactaggtcagttaggtgccagtggtatccagtgcctaaatcacttggtagccaaacaggtttattggtggctccccaattacatgtaggagacacgggatcaaagaaaccaccaaaacctggtatcagtttaccacttctggcaattgctacatacagagctggaaatatggtagctatcaacagaaccatctcaatcttatcaacgaggtaaaatggaacaatcattccaggagctatggcaggatatatgcagaagaccagtcccataccaacaaggaccatgagaaatggaaacataatgtaccaatgggcactatctagactactgtagccatcagtgcccttaatgtgccatagacttgtgaattgggttttggcagtaccttgagagagagcggattggacatcagcgagggcatcatctttgggttctttttcaccagtagtaccagatttaagttgttcaagttttccgagggcttgagtgattgaatcgccaccgctgctgccagttctgattctggtttggccagtagttgtgagtttagttttgactgcatcggcctgaccgtcgagtttgacagatttgagagcttctgtggccggtccttgaagatcagtgtcctcaattttggcttcatcattgtgactggcaccgagggctcctttgacttcggcgacggcagcttgttttttagcaggatcagtgagggtttcgagggcttcagtgacttgagatttaggaacaccagattggatattagtgatttcaagatgttcttcgagttgggttttgacggcatcggctttagtggagagaccattagcagcattgaggacagcttggatggtttcggtgagatcaagattgacaggatcttgttgagcttgagctgatttgagagcctgttcaactttagctaccacagctgtggcgagtttgtcaaccttaccattgagaccctgtatgatagcttttactacctcagtggccttagatttgagagcgtcatcttctgttggatgctttgaaacatatcctaaggtccacatgacagctgataggagtgacagtaaaatggctaccacaaggtctatgtagaccatcaggaagtcactgttccacttccttctgttaccaaacattagggatgacaggtagtggatcagagaagtgaggactggaaatgagttttctccagctatgtagatgggcaaataattatcatcaatagcaaacgtcaacacattactgagaccaaacacaaatccagaaacagcaatcacaaagtaaaaggctgttagatgacctttgtctccaggtacgtagactaaaagaagtatcaagtaggttatgaaattaagccactggacagctatggaaggatagacaacggtattgcgttttagttccttgttgtcagtggcttctttggcgtcaccgtcttttttatatgtgtaggtagtgccgaatatgttgtcaaagtctactgccagtttagctccatgttctataccgtctgccacaacgaatgctggaagacaccaaagctctttcactttttactactttatctaccagtactttatctacttcctttatctatctaccacatactcttcactttattacattacattatcactttactttattacattaagctttattagattacatcatactcttactctggtgttagattaccactttgttagattacattctccctccattagtattagattactttaacttttgttagattagctcatttctttctatgcatagtaacaggtctcttctcaggtctttggtgaacaatgctgctaggttcttattgcagttcttggaggccattttggtccagtacctaagggcattccacctagtcattcctgctgtaggccaattgctaggatcatgtctcttatactcaataatgtaaccttcagaatatggagctaacagacacatcagaaatgcacctatcagctgagccgtaagggctaggatgctaccacctccattaccaccaaagatacctggaaatcctacagccaatgagatctcatgacacatatagaatagaatggttagacatgtagacattttgggttggttgatgattgatctggcaactgatgagtctctgtaatgcagtgagtaaataaataaataggctaaaatgatcatggtaggaatcactaggtcagttaggtgccagtggtatccttggcctaatggtactccaggtatccagggtagttcatttttggctccccaattacatgtaggagacacgggatcaaaaaagtcaccaaaacctggtatcagtttaccacttctggcaattgccacatacagagctggaaatatggtggctatcaacagaaccatctcaatcttatccacgaggtaaaatggaacaatcattccaggagctatggctggatatatgcagtagactagacccataccaatcaggaccataagaaatggaaacataatgtaccaatgggcactatctagactactgtagccatcagtgcccttaatgtgccatagacttgtgaattgggttttggcagtaccttgagagagagcggattggacatcttggacggcctcaggtttgggttctttttcaccagtagtagtaccaggtttattttgttcaagttttgtgagggcttgagtgattgaatcgccgatatttatttgggttttaccactaccaccagatttgagattagttttgactgcacctgcctgattttggagtttgacagttttgagagcttctgtggccggtccttgaagatcagtgtcctctactttggcggtatcattggcagtggtaccaccgagagctcctttgactatgtcgacggcagcttgttttttagcaggatcagtgagggtttcgagggcttcagtgaccacagcttgagcaacaccattaccaggagtgatactaagatgtgattcgagagcttctttgacgctttggacttgaccttggagaccattatctgttttgaggactccactgatgttagtggtgagattaactgtgacattaccttgatcttgaggttgagctagaggttggagagcttgtttgagagcctgttcaactgcagttaccacagcttcggagagtctgtcgaccttttcattgagatgttgtatgatcttatttactacctcagtggccttagatttgagagcgtcatcttctgttggatgctttgaaacatatcctaaggtccacatgacagctgataggagtgacagtaaaatggctaccacaaggtctatgtagaccatcaggaagtcactgttccacttccttctgttaccaaacattagggatgacaggtagtggatcagagaagtgaggactggaaatgagttttctccagctatgtagatgggtaaataattatcatcaatagcaaacgtcaacacattactgagaccaaacacgaatccagaaactgcaatcacaaagtagaaggctgttagatgacctctgtctccaggtacatagactaaaagaagtatcaagtaggttatgaaattaagccactggacagctatggaaggatagacaacggtattgcgttttagttccttgttgtcagtggcttctttggcgtcaccgtcttttttatatgtgtaggttttgccgaatatgtctgtttctactgccagtttagctccatgttctataccgtcagccaccattatcatcatcagtgtattactatctattggtatctatctaccacatactcttcactttattacattaagctttattagattatcacattacattctctcttactctagtattagattatctctcttactcttgtattacataatctcttactcttttattacattagttcatttctttcactattactattaccacttactatcactttacattacattctctcttactatctcttactctggtattagattacatcatctcctactctattacttttttgttagattatctctttgttagattagctcatttctttctatgcagagtaacaggtctcttctcaggtccttggtgaacagtttagcattagctatttaccacattccagattagttaggtattaggtttagtatcagattagtatagtattagtatcggtttcagtcttatcttactacttggtatagtattggtttcagttatcttcttactttagtttaactatctacctagctacatactttatatctatttaccacatactctcttttattacattaagctttactagattacattatcttattacatcattacatttatcattcttattacattaactctctaactctagtgttagattaccactttgttagattagctcatttctttctatgcagagtaacaggtctcttctcaggtccttggtgaacaatgctgctaggttcttattgcagttctttgaggccattttggtccagtacctaagggcattccacctagtcattcctgctgtaggccaattgctaggatcatgtctcttatactcaataatgtaaccttcagaatatggagctaacagacacatcagaaatgcacccatcaactgtgccgttagggctaagatgctaccacctccattaccaccaaagatacctggaaatcctacagccaatgagatctcatgacacatatagaatagaatggttagacatgtagacattttgggttggttgatgattgatctggcaactgatgagtctctgtaatgcagtgagtaaataaataaataggctaaaatgatcattgtgggaatcactaggtcagttaggtgccagtggtatccagtgcctaaatcacttggtagccaaacaggtttattggtggctccccaattacatgtaggagacacgggatcaaagaaaccaccaaaacctggtatcagtttaccacttctggcaattgctacatacagagctggaaatatggtagctatcaacagtaccatctcaatcttatcaatcaggtagaatggaacaatcattccaggagctatggcaggatatatgcagtagaccagacccattcctacaaggaccataagaaatggaaacataatgtaccaatgggcactatctagactactgtagccatcagtgcccttaatgtgccatagctggatgtatggatctttatcagtaccttgagagagagcggattggacgtcagcgatggcttcaggtttgggttctttttcttgactactaccaggtttagtttgtttgagttttccgagagctgcagtgattgaatggccgatatttatttgggttttaccactaccaccagttgtgagtttagttttgactgcacctgcctgattttggagtttgacagttttgagagcagttgtggcaggtgcggtgagatctttatcctctattttagcggtatcattggcactgggaccaccgagagctcctttgactgcggcgatggcagcttgttttttagattggaggttttggatggctgcctggactgcagatttatcaacaccaccttggatattagtgatttcaagatgtttttcgagagcttctttgacgttttggactagagtggtgagaccattattatcggtgaggacattactgatgggactgtcgagattagttgtgactttatcaccttgaccttcaggttgaggttgagattggagagcctgtttgagagcctgttcaactttatctaccacctcagaggcgagtctgtcaaccttaccattgagaccctttatgatcttggttactatttcagtggccttagatcggtattggtttcagtcttatcttcttactttagtttagtattggctttggttagcttcttacttcttattggtttcagttatctttctaatcttactttaactatttacctagctacttactttgtatctaccacatactctcttactctagtattacattacctctttactagattacattactccattacattaccactttattagattacattagtcttattacattacattagtatcttattactcttactcttactcttttgttagattatatactctcttactatcacatatctcttactctagtattagattatctctttacattacattatctcttactctagtattagattatcactttacattacattatctcttactctagtattagattatctctttacattacattatctcttactctagtattagattatcactttacattacattaactcttactctagtattacattaacactttacattacagccttactacattacttactaatctaccacattacttacactcttactttagtatcactctgttagattagctcatttctttctttttagtatcttattactatcttattactatcttattactatcctttagtatctattactatcttattagtgtcttattactgtcttattactgtcttattagtatcctttagtatctattactatcttattactttacattattacattcttacatactctcttactttgtgttagattcactcttactttgtgttagattcactcttactttgttagattatcttttactctagtgttagattagctcatttctttctatgcagagtaacaggtctcttctcaggtccttgacaacgggttagcattatctatttaccacattccagattagtttagtattagtttagtattagattagtattagattagtatcagattagtattggattagtattggtttcagttagcttacttttagtttaactatctaccttactacatacttttaggcattacattctctctttctctagtattacattacattactctcttactactttgtgttacattatcacttcgttagattagttcatttctttctatgcagagtaacaggtctcttctcaggtccttggtgaacaggtttgtatcatctatttaccacattccagtttagttaggtatttgattaggtatcagattagtttagtattggtttcagttagcttactagtttcttttgtttagttttagttatctacttactagtttagtattagtttcagttagcttactacttactttggtattggtttcagttatcttacttttacattaactaattacctagctatttactttattattatctaccacatatcattcactttattattacattactattacattacattatctctttgttagtgttagattatctctcttactcttgtattacataatctcttactcttttattacatactctctttatttcttttactttgttagattagctcatttctttctatgcagagtaacaggtctcttctcaggtccttggtgaacaatgctgctaggttcttattgcagttctttgaggccattttggtccagtacctaagggcattccacctagtcattcctgctgtaggccaattgctaggatcatgtctcttatactcaataatgtaaccttcagaatatggagctaacagacacatcagaaatgcacctatcagctgtgccgttagggctaagatgctaccacctccattaccaccaaagatacctggaaatcctacagccaatgagatctcatgacacatatagaatagaatggttagacatgtagacattttgggttggttgatgattgatctggcaactgatgagtctctgtaatgcagtgagtaaataaataaataggctaaaatgatcatggtgggaatcactaggtcagttaggtgccagtggtatccagtgcctaaatcacttggtagccaaacaggtttattggtggctccccaattacatgtaggagacacgggatcaaagaaaccaccaaaacctggtatcagtttaccacttctggcaattgctacatacagagctggaaatatggtagctatcaacagaaccatctcaatcttatcaatgaggtaaaatggaacaatcattccaggagctatggcaggatatatgcagtagaccagacccattcctacaaggaccataaggaatggaaacataatgtaccactgggcactatctagactactgtagccatcagtgcccttaatgtgccatagctggatgtatggatctttatcagtaccttgagagagagcggattggacgtcagcgatggcttcaggtttgggttctttttcaccagtagtagtaccaggtttagtttgtttgagttttccgagagctgcagtgattgaatggccgatatttatttgggttttaccactaccaccagttgtgagtttagttttgactgcacctgcctgagcttctagtttgacagttttgagagcttttgtggcaggtgcggtgagatctttgtcctcaattttagcggtatcattggcactgggaccaccgagagctcctttgactgcggcgatggcagcttgttttttagattggaggttttggatggctgcctggactgcagatttatcaacaccaccttggatattagtgatttcaagatgt

SEQ ID NO: 76 - DNA, 13275 bp, Theileria parva
agtattcctttatatctattactatcttattactttacattattacattcttacatactctcttactttgtgttagattcactcttactttgtgttagattcactcttactttgttagattatcttttactctagtgttagattagctcatttctttctatgcagagtaacaggtctcttctcaggtccttgacaacgggttagcattatctatttaccacattccagattagtttagtattagtttagtattagattagtattagattagtatcagattagtattggattagtattggtttcagttagcttacttttagtttaactatctaccttactacatacttttaggcattacattctctctttctctagtattacattacattactctcttactactttgtgttacattatcacttcgttagattagttcatttctttctatgcagagtaacaggtctcttctcaggtccttggtgaacaatgctgctaggttcttattgcagttctttgaggcctgtttggtccagtacctaagggcattccacctagtcattcctgctgtaggccaattgctaggatcatgtctcttatactcaataatgtaaccttcagaatatggagctaacagacacatcagaaatgctcccatcagctgagccgtaagggctaggatgctaccacctccattaccaccaaagatacctggaaatcctacagccaatgagatctcatgacacatatagaatagaatggttagacatgtagacattttgggttggttgatgattgatctggcaactgatgagtctctgtaatgcagtgagtaaataaataaataggctaaaatgatcatggtgggaatcactaggtcagttaggtgccagtggtatccagtgcctaaatcacttggtagccaaacaggtttattggtggctccccaattacatgtaggagacacgggatcaaagaaaccaccaaaacctggtatcagtttaccacttctggcaattgctacatacagagctggaaatatggtagctatcaacagaaccatctcaatcttatccacgaggtaaaatggaacaatcattccaggagctatggcaggatatatgcagtagacaagtcccatgccaactaggaccatgagaaatggaaacataatgtaccactcagcattatttagactactgtagccatcagtgcccttaatgtggaatagactaatgaattgggctctggcattatcagctttgagttttttttggacttggtcgatggcattagttttagtagcattttctgtgagtatgttgatggcttgggctattagagtttgatcattggtaatactgactttagttagagctgtgggaatttgagtggcctgagcttggagtttgaccttagtgagaacatttgttgcaggttcggtgatatctctggtggattgaacaagagtggctttgagtggggttttgactgcgttgatggcatcttgtttgggttgatcattactagtactagttcgaagtgcattgagagctgcagagacttgagtagtaccaccttccacaaagctaatttgtcctttgagagcttcgacaacttcttggagttgagattggagattgactttagtgaggacagttgtggtgggagttgtgagatgagtttcttcatcaactttaccatcagcagcttcatcttctttgagagcagctatgaccttagttactacagctttggcgagtttgtcaaccttaccattgagaccctgtatgatagcttttactacctcagtggccctagatcggtattggtttcagtcttatcttcttactttagtttagtattggctttggttagcttcttacttcttattggtttcagttatctttctaatcttactttaactatttacctagctacttactttgtatctagctaccacatactcatcactttattacattaagctttattacattacattacattgtcttattacatcactacattctctcttactattacattaactctctaactctagtgttagattaccactttgttagattagctcatttctttctatgcagagtaacaggtctcttctcaggtccttggtgaacaatgctgctaggttcttattgcagttctttgaggcctgtttggtccagtacctaagggcattccacctagtcattcctgctgtaggccaattgctaggatcatgtctcttatactcaataatgtaaccttcagaatatggagctaacagacacatcagaaatgcacctatcagctgagccgttagggccaggatgctaccacctccattaccaccaaagatacctggaaatcctacagccaatgagatctcatgacacatatagaatagaatggttagacatgtagacattttgggttggttgatgattgatctggcaactgatgagtctctgtaatgcagtgagtaaataaataaataggctaaaatgatcattgtgggaatcactaggtcagtcaggtgccagtggtatccttggcctaatggtactccaggtatccagggtagttcatttttggctccccaattacatgtaggagacacgggattgaagaaaccaccaaaaccttgtatcagtttaccacttctggcaattgccacatacagagctggaaatatggtagctatcaacagtaccatctcaatcttatcaatgaggtaaaatggaacaatcattcccggagctatggcaggatatatgcagaagaccagacccataccaaccaggaccatgaggaatggaaacataatgtaccaatgggcactatctagactactgtagccatcagtgcccttaatgtgccatagctggatgtatggatctttatcagtaccttgagagagagcggatttgacgtcagcgatggcttcaggtttgggttctttttcaccagtagtagtaccaggtttattttgttcaagttttgtgagggcttgagtgattgaatcgccgatatttatttgggttttaccactaccaccagatttgagattagttttgactgcacctgcctgattttggagtttgacagatttgagagcttctgtggccggtccttgaagatcagtgtcctctactttggcggtatcattggcagtggtaccaccgagagctcctttgactatgtcgacggcagcttgttttttagcaggatcagtgagggtttcgagggcttcagtgaccacagcttgagcaacaccattaccaggagtgatactaagatgtgattcgagagcttctttgacgctttggacttgaccttggagaccattatctgttttgaggactccactgatgttagtggtgagattaactgtgacattaccttgatcttgaggttgagctagaggttggagagcttgtttgagagcctgttcaactgcagttaccacagcttcggagagtctgtcgaccttttcattgagatgttgtatgatcttatttactacctcagtggccttagatttgagagcgtcatcttctgttggatgctttgaaacatatcctaaggtccacatgacagctgataggagtgacagtaaaatggctaccacaaggtctatgtagaccatcaggaagtcactgttccacttccttctgttaccaaacattagggatgacaggtagtggatcagagaagtgaggactggaaatgagttttctccagctatgtagatgggtaaataattatcatcaatagcaaacgtcaacacattactgagaccaaacacgaatccagaaactgcaatcacaaagtagaaggctgttagatgacctctgtctccaggtacatagactaaaagaagtatcaagtaggttatgaaattaagccactggacagctatggaaggatagacaacggtattgcgttttagttccttgttgtcagtggcttctttggcgtcaccgtcttttttatatgtgtaggttttgccgaatatgtctgtttctactgccagtttagctccatgttctataccgtctgccacaacgaatgctggaagacaccaaagctctttcactttttactactttatctaccagtactttatctacttcctttatctatctaccacatactcttcactttattacattacattatcactttactttattacattaagctttattagattacatcatactcttactctggtgttagattaccactttgttagattacattctccctccattagtattagattactttaacttttgttagattagctcatttctttctatgcatagtaacaggtctcttctcaggtccttggtgaacaatgctgctaggttcttattgcagttcttggaggcctgtttggtccagtacctaagggcattccacctagtcattcctgctgtaggccaattgctaggatcatgtctcttatactcaataatgtaaccttcagaatatggagctaacagacacatcagaaatgcacctatcagctgtgccgtaagggctaggatgctaccacctccattaccaccaaagatacctggaaatcctacagccaatgagatctcatgacacatatagaatagaatggttagacatgtagacattttgggttggttgatgattgatctggcaactgatgagtctctgtaatgcagtgagtaaataaataaataggctaaaatgatcatggtaggaatcacgaggtcagtaatgtgccataggaaactaaaattgttaggatcatagttccatgtttgaccccagttaagagtagtctcacctgaccatttcgtagttggagcccatgcacttgagaaaccaccaaaacctggtatcagtttaccacttctggcaattgctacatacagagctggaaatatggtggctatcaacagaaccatctcaatcttatcaatgaggtaaaatggaacaatcattccaggagctatggcaggatatatgcagtagaccagacccataccaaccaggaccataagaaatggaaacataatgtaccaatgggcactatctagactactgtagccatcagtgcccttaatgtgccatagactagtgaattgggttttggcagtaccttgagagagagcggattggacatcttggacggcctcaggtttgggttctttttcaccagtagtagtaccaggtttattttgttcaagttttgtgagggcttgagtgattgaatcgccgatatttatttgggttttaccactaccaccagatttgagattagttttgactgcacctgcctgattttggagtttgacagttttgagagcttctgtggccggtccttgaagatcagtgtcctctactttggcggtatcattggcagtggtaccaccgagagctcctttgactatgtcgacggcagcttgtcttttagcaggatcagtgagggtttcgagggcttcagtgacttgagatttaggaacaccagattggatattagtgatttcaagatgttcttcgagttgggttttgacggcatcggctttagtggagagaccattagcagcattgaggacagcttggatggtttcggtgagatcaagattgacaggatcttgttgagcttgagctgatttgagagcctgttcaactttagctaccacagcttcggagagtctgtcaaccttttcattgagaccctgtatgatagcttttactacctcagtggccttagatttgagagcgtcatcttctgttggatgctttgaaacatatcctaaggtccacatgacagctgataggagtgacagtaaaatggctaccacaaggtctatgtagaccatcaggaagtcactgttccacttccttctgttaccaaacattagggatgacaggtagtggatcagagaagtgaggactggaaatgagttttctccagctatgtagatgggtaaataattatcatcaatagcaaacgtcaacacattactgagaccaaacacgaatccagaaactgcaatcacaaagtagaaggctgttagatgacctctgtctccaggtacatagactaaaagaagtatcaagtaggttatgaaattaagccactggacagctatggaaggatagacaacggtattgcgttttagttccttgttgtcagtggcttctttggcgtcaccgtcttttttatatgtgtaggttttgccgaatatgtctgtttctactgccagtttagctccatgttctataccgtctgccacaacgaatgctggaagacaccaaagctctttcactttttactactttatctaccagtactttatctacttcctttatctatctaccacatactcttcactttattacattacattatcactttactttattacattaagctttattagattacatcatactcttactctggtgttagattaccactttgttagattacattctccctccattagtattagattactttaacttttgttagattagctcatttctttctatgcagagtaacaggtctcttctcaggtctttggtgaacaatgctgctaggttcttattgcagttcttggaggcctgtttggtccagtacctaagggcattccacctagtcattcctgctgtaggccaattgctaggatcatgtctcttatactcaataatgtaaccttcagaatatggagctaacagacacatcagaaatgcacctatcagctgagccgtaagggctaggatgctaccacctccattaccaccaaagatacctggaaatcctacagccaatgagatctcatgacacatatagaatagaatggttagacatgtagacattttgggttggttgatgattgatctggcaactgatgagtctctgtaatgcagtgagtaaataaataaataggctaaaatgatcattgtgggaatcactaggtcaaagaaatgccacatatagttacatggagaaccaggaaaaaaatctttagagttgtctgtccatgctgccttaggtgaccagccaaacttgtatttggtaactatggctacaatgagaggtggaaatatggtagctatcaacagaaccatctcaatcttatccacgaggtaaaatggaacaatcattcccggagctatggctggatatatgcagtagaccagtcccattccgacaaggaccatgaggaatggcataaaggttttaggatcaacaatttcgccttggtagccacctggaggattaatgtgccatagctggatgtatgggtccttttcagtgccttgagagagtgcggattgtacgtcagcgatggcagtagcattgggttgtccttcttgttggagttttccgagggctagagtgattgtgtcggcaccgatattgatattggtttggccaccgccaccagatttgagattagttttgactgcttggattttaccttggagaccattcttagtggtgaggacagtaccgattggtgtatcgagatcagtgtctgtaatattagtggcttcgagggcttgtttgactgcggcgatggcctcaggtttgggttttccattttcttggaggttatggagggcttgagagattgaagttgtatcagctgtgatacccagattaggaccttgttggagtttatttttgacttgaccggcttggccttggagattgaccttattgagaacttcattgatgggagtgtcgagatgttcatccttgactttggcaacaacagcaagggcttctttgaggatagtagtggcatcatgttttttgggatcatacgtttggttaaggttagtgagtttagggagagtggttgagatagcatcggagatatctttatctgcatttgtgatgtctagaggtgtgagcgcttcagtgatttgggtggcttgggctttgagggcttcgaggactgactgaactacagctttgactgtggcggtaccacttctagcttgggcactttggatggcactttggatggcctgatcgatggccagtttgacttcttggatggcttcaatttttgtgccggcctcttctattttggattctaggtgttttacgatagcttctaccacttcagcggagctattgatcttaccattgagaccttctatgatcttggttactacttcagtggcctttggtttgagagcatcttcttctgttggatgctttgacacatatcctaaggtccacagtacagctgacagaagtgacagcaaaatggctaccacaaggtctatgtagaccatcaggaagtcactgttccacttccttctgttaccaaacattagggttgacaggtagtggatcagagaagtggtagctggaaaacaattttctccagctatgtagatgggtaaataattatcatcaatagcaaacgtcaacacattactgagaccaaacacaaatccagaaacagcaatcacaaagtaaaaggctgttagatgacctttgtctccaggtacatagactataagaagtatcaagtaggttatgaaattaagccactggacagctatggaaggatagacaacggtattgcgttttagctccttgttgtcagtggcttctttggcgtcaccgtcttttttatatgtgtaggttttgccgaatatgcctgtttctactgccagtttagctccatgttctataccgtcagccaccattatcatcatcaatgtattactatctattggtatctatctaccacatactttctatttattacacactctacatctatctatcacatactcattacattatcactatgttagattacataccacctccattagtgttagattatctttttgttagattagctcatttctttctatgcagagtagcaggtctcttctcaggtccttggtgaacaatgctgctaggttcttattgcagttcttggaggccattttggtccagtacctaagggcattccacctagtcattcctgctgtaggccaattgctaggatcatgtctcttatactcaataatgtaaccttcagaatatggagctaacagacacatcagaaatgcacctatcagctgagccgtaagggccaatatgctaccacctccattaccaccaaagatacctggaaatcctacagccaatgagatctcatgacacatatagaatagaatggttagacatgtagacattttgggttgattgatgattgatctggcaactgatgagtctctgtaatgcagtgagtaaataaataaataggctaaaatgatcatggtaggaatcactaggtcaaagaaatgccacatatagttacatggagaaccaggaaaaaaatctttagagttgtctgtccatgctgccttaggtgaccagccaaacttgtatttggtaactatggctacaatgagaggtggaaatatggtagctatcaacagaaccatctcaatcttatccacgaggtaaaatggaacaatcattcccggagctatggctggatatatgcagtagaccagtcccattccgacaaggaccatgaggaatggcataaaggttttaggatcaacaatttcgccttggtagccacctggaggattaatgtgccaaaaaaaatcaggagtagatttatcttgtttctttgcgtgacttgacagataggctaaggtccacatggcagcagctgcaaaggatatcaggatggctaccactaggtctatgtagaccatcagaaagtcactgttccacttccttctgttaccaaacatcagactacttaggtagtggatcagagaagtggtagctggaaaacaattttctccagctatgtagatgggcaaataattaacatcaatagcaaacacagtgacgttgcagaaaccaaacacaaatccagatatagcaatcacccagtagaacattgttagatgaccactgtctccaggaacatagacaataagaagtatcaagtatgttaagaaattaagccactgggctatgactgatggccaaactattatccaaaacttattgatacgaagtgcgtcagtgaacccattcttgagatctgtgaggttattgacaatggattcgtaattggttttgatattgcctgttgtgcttttgtacgcggtttcgaacttcttgacagcctctaacttgtcatagggtttttcgatggcctccgttagggcgttgtactttttgagtgcatcagaggcctgagagcatacatctaggaaatctccagcattggcactactgagttcggacagtgattgttgtagattgctggcaacactaccactgttgagggcgttgtagagattatcttcagccttatatactgcattgaaggcttcccaggcatccactacggctttgtacttagattggtaactgtcgtatttttgtgaagtattttgagtctggacatcgctgaatttactttctacttgggtgtattggtccgtgacagcctgggccgaaccagttagaccagtaccagtaccagtagcttcggcgagtgtctttaggttggatcggagtttaccagtatcactggtttcatcggcgcctactgcagcggccagaccgctggccttactactatctttaccacctactgcattgtgtagggcatgggccgcggtgtgaagagtttctgccagtttcctcaacttgccttcctcttgttctttgccagccttggccttcagaaccttagcggcttcagcattattagcttcgactccatttttgagtgctagggccttagtggatagttctccggccttttgggatagatttgatgcttcctttttgagtgcgtgggctgaggcgggtattagggtctcatagtgggcaagtatctgactactacctagtaccattactaccttagtagtcttaagttacttcttattagttattggtttcagttatcttctactttagtattggtttcagttatcttatttctttagtttaactatttaccttgctacctacttttaggtattacatattacattctctaactatcttattactatcttttagtatcttattagtatcttattagtatcttattactatcctttagtatcctttagtatcctttagtatcttattagtatcttattagtatctatctatcacatactttctatttatcacacactctacatctatctatcacatactttctatttatcacacactctacatctatctatcacatactcattacattattattagattactactacagtattacatctcattacatattacattatcactttacattacattactactacagtattacattcactcttactctagtattagattacattatctcttactattacattaccacatactctcttactctggtattagattacattacattattactttaacttttgttagattagctcatttctttctatgcagagtaacaggtctcttctcaggtccttggtgaacaatgctgctaggttcttattgcagttctttgaggcctgtttggtccagtacctaagggcattccacctagtcattcctgctgtaggccaattgctaggatcatgtctcttatactcaataatgtaaccttcagaatatggagctaacagacacatcagaaatgctcccatcagctgagccgtaagggctaggatgctaccacctccattaccaccaaagatacctggaaatcctacagccaatgagatctcatgacacatatagaatagaatggttagacatgtagacattttgggttggttgatgattgatctggcaactgatgagtctctgtaatgcagtgagtaaataaataaataggctaaaatgatcattgtgggaatcactaggtcagtcaggtgccagtggtatccttggcctaatggtactccaggtatccagggtagttcatttttggctccccaattacatgtaggagacacgggattgaagaaaccaccaaaaccttgtatcagtttaccacttctggcaattgccacatacagagctggaaatatggtaatgatcaacagtaccatctcaatcttatcaatgaggtaaaatggaacaatcattcccggagctatggcaggatatatgcagaagaccagacccataccaaccaggaccatgaggaatggaaacataatgtaccaatgggcattatctagactactgtagccatcagtgcccttaatgtgccatagactaacgaatttagttttggcaccagaatcaccagctgagagtgcggattggacgtcttggatggcatcacctttatttgatgtttggagttttccgagagctgtattgattgaatcgccaccgctgctgccagttctgattctggtttggccagtagttgtgagtttagttttgactgcatcggcctgaccgtcgagtttgacagatttgagagcttctgtggcaggatcggtgagatctttgtcctcaattttggcttcatcattgtgactggcaccgagggctcctttgacttcggcgacggcagcttgtcttttagcaggatcagtgagggtttcgagggcttcagtgacttgagatttaggaacaccagattggatattagtgatttcaagatgttcttcgagttgggttttgacgtcttggacttgaccggagagaccattagcagcattgaggacagcttggatggtttcggtgagatcaagattgacaggatcttgttgagcttgagctgatttgagagcctgttcaactttagctaccacagctgtggcgagtttgtcaaccttaccattgagaccctgtatgatagcttttactacctcagtggccctagatcggtattggtttcagtcttatcttcttactttagtttagtattggctttggttagcttcttacttcttattggtttcagttatctttctaatcttactttaactatttacctagctacttactttgtatctaccacatactctcttactctagtattacattacctctttactagattacattactccattacattaccactttattagattacattagtcttattacattacattagtatcttattactcttactcttactcttttgttagattatatactctcttactatcacatatctcttactctagtattagattatctctttacattacattatctcttactctagtattagattatcactttac

SEQ ID NO: 77 - DNA, 39579 bp, Theileria parva
ttacgtaaaattttttagtgcattttttattaatgtaattaaattattttttttaaacaattttaatatagttttaatattagaatatatttttataggtttgatcctggcttagaataaacgctttaaatgaattttttagtcagcgtaattaaactttaaattaacatttttcttaatgtaatattaaagttagtgtagaggtgagtaataaataagattaatttttataaattttaagaataaattttaaagttagttaaataattttaattataattcttattttgtgctttaagtactttaaaaaattttgtttataatttaattttattttttgattagctaattaatatcgtaatttgatattaaggcgaagatcaatagctaatttgagaaaatgaaagtcacattagaactgagacaaattctaaacttctttaatggggtaagctgatcgggaagtgaaagcaattagcgaaagctaaactacgttacattcagtgaaggtagaaataaagtgtaaacttctgtgtataatttaaaaaataagttaattggattgtaagaaaatatcggctaactctgtgcaagcatccgcggttagacagaggatattagtgttattcacgattattgggcgtaaagcatttttagatggatttttgtattagttgaacaatttaaaaaagaaatttttaaacatttaattaaaattaaaaatctagagaatagtataagtttaaggaattttttgaggaacagtgaaatgttacgatacattaaggaagaccgagaatgaaaatattaagctaaactatttctgacatttaaataatgaaagctagaggagcaaatgggatttggtaccccagtagttctagctgtaaactatgaatattaagagcattaaatattttaaatttattgctttaaagctaacgcgttaaatatttcgcctgaatagtacgttcgcaagaataaaatttaaaggaactgacgggagcttatataagtgatgggtcatgttgaagaatagatgaaaccctaagaatcttaccaaagtttaaagtagttgattgattgtttttatataataatctaatcaatttataggtgttgcatggttgtcgtaagctagtgctgtgaggcctcaaattaatttttgtaactagcgcaacccttttcatttattttcatattttatataagtaattcttatattgtatatagattaggaagaggaggacgacgtcaaatcatcataatctcgttactttgggccgtttaacgtgacacaatgatgaatacaatatagatataaataaattttttaataaattttattatatttttaaaatttatcaaagtgctgagtataaactgtaatttgtttatacaatattgtagtaaccactagtaatcgttagtcagatatataacggtgaattttgaaataagctttgtacacacagcccgtcaagttctgaaatttgatcaatcataaactatttatgtgatagtaaataattgattagagatcggaactaagtcgtaacaaggtagccgtacctgaaggtgcggctggattttatgtgtaattgtaggttgtaatgttttataaattttacgtataaatataaaaaatattttttacttatctaagatatttaaatataaattttaaaagtttttaaattccaattgaatttgatattaaatttaatgtttagactattatattattaattaaagttaatattaaaatagtaaaatatctaagattttatatataaaaaatatttttaagaatttttatagaaaatataatttaaaataaaataaatttttgtaaataatagtttttaatctatttgttttctaataaattaattttcaaattgtttttttttaaattaaaatttaaaatggatttctataattttatagtcgaagaaggtcgtattttaaaacgaaaatttatatttttatatataaagttaccgaatatgttgaacatttttaatatttttatttaaaaataaaaataagtatattttaggaactgaatcatcttagtactaaaataaatataatgtaacaacgattttcttagtagcggcgagtgaaaaggaaatatttatgaatatttgattttatatcattgtaaaattaaaatatttatgttaagtttttaatatgtaaagtaaatttgtgttttatttgatttttatttttagaaccatcttaaaaactttaaataatataaaattttatagagaactagtatcgtgagagaaagatgaaaagatttttgaataaaaaagtgaaaagaacatgaaattttaaattttataatttttattcaatttaaatttacaaattataatttaattgaatgcttgttgaagaatgagtcggtgagttataattattaaataaataaatttattaagatttattgtaataagagttgaagcgagttttaatcactttaaaaactattttaatttaataattatagatccgaacccaaatgatctaattatgttcagaaattatattgtaatgatataatgttcgaaccagttaatatttcaaaattattggacgaaatgtaattagtggtgaaatgctaatcgaatttggagctagctgattctctctgaaatgtatttaggtacagattaatgttaaaaacgaaatgtatagctctatattatatcgtagtaattttaatagttattatagatatttaataaactgtaaattatcgtttctacttaattattaaaatttaataataagtaaaatataatatattaaattgagactattagggttaagcttaatatgtcaaaagggaaacagcccagattatttaataaggtcttaaaatgtatatttagtaaaagatagtttaattataaagacatcttaaaatataagcttttaagcagctattatctaaggagtgcgtaaaagctcattattatatgtttttaaacatctaaaataatatagactaagttatataacctaacctgtaaagtaaatatttttacatatttatctagtaagagagcgttttatttatctataaatagtttatattcaaatataaatgaaaaattataaataaaagtgataatgccgatttaagtaatataatattagatataatctaatactcctattgtttatagatttcctattatatgatttaatcaaatagggttagtcgaagtctaagagtaaaattttattttattcgatgaagattaaatattaatgttttatttaaatttctatattaaatatttaaaatttttatataaagttttagtatgtaacaaatattaaatagaaatacttattttaaaaaattatttaattatattcgtattaaatctgaaacaagtgaacaagtagaaaatatactaaggagatgaataacttttctttaaggaactaggcaaaatgattccgtaacttcgggataaggaatacaatgagtgtaaaatactaggttcaaacgactgtttatcaaaaacacaggcttttgctaaatttaataatgatgtacaaaagctgatgcctgtccagttctagtaagttaacaaaaaatattaattgtgatatatttttataagctctagtaaaacgacggctgtatttttaacggtcctaaggtagcgtaaccccttgccgggtaagttccggcccgcatgaaaggcgtaacgatttgaacgctgtcttaaagaaatattcaatgaagtaataatgtctgtgaagatacggactatttacaccaggacagaaagaccctatgaagctttactatagtttattaacgaagacaaatattaaattatgcagaataaatggttttaaaatattaaaaattttttaatattttttgatatatgaaataccatttttttaatattaattttctaataattttaatataaatatttagttaaatttaattttaaacttgatagtttgactggggcggtcccctcccaaatagtaacggaggataacaaaggttatttgttattgtctaaattgacaataaaaatattaaaagatgtttaatagcttaactgttaaataaacatattatacagtaacgaaagtttgtcttattgaccctataaatattatttatggatattttatagatcaacggataaaagttactctagggataacaggctgatctctcctaaatgttcaatgacggggaggtttggcacctcgatgtcggcttatcgcatcctgaggatgagaagttctcaagggttggtttgttcacccaaaacagcggtacgtgagctgggttcagaacgtcgcaagacagtttggtccatatccggtgtaaattaatagaacattgtgatgattttttgtggtacgcaaggactaggaaaattacataaatggtgtaacagttattttaaaaattttattttttaaagtattttgttgttaagctaaatgtgaaaagaatataatcgctgaaagcagataagcgagaatattaatttaaatatgttctataattttaattgatttaagatgttatttatataataaataatataaaatataaatataagcttacatatcgaaagatattaaactttatatttataatatcgataattttattttatattgattttatgctgatatagtttaaatgttaaaacagttgatttgtaatcagctaaataagagttacagtctctttttcagcttattaaaattaaactttaagtgatatacaatataaaaaaattaaaaacattaagaaaatttaatttaactaatatatatgaattaactactaaaacaaatataatatttaaaaaaaaaaaacatatatataaagaatacaagttacctacaaatataaaaatacttaaaattttatatgatgttaaggacaagaaattaaaatactctttcaacaaatttttatttgtaaacatatataaattcttaaaaattttaaaatccagattagattttgttttatttaataataatttattttcaactataaatcaatcaaaacaaaatatatcacataaacatatatttttaaacaatacaattgcaagacatccaagttattgtgttaaaaatttagatattatacatttatataatatatcttgcgatcaaataataaaaaaacttatatataatcatataattagaaatataactataaataaaatttgtagaaaaacatgtaaacctatattaattaaacaaattattttaaaatttgatatgaacaatttaaataatacaatgtgtaataaaaattttaaaatacaaataaataaaactaaaactagtgactattatattaaacataaaatttaaaatttatgttttgcatatacttaaaaatttttcattataaaatataattttccaataaattatataataatataaaaaaataatatatatataatttaactaaaatattaattttccgaattaattttgagggttagaatccctctatatatattatttataaaactagaaatatataatttttatctttgtgtttgcattaaattaaaattttgggtaaatatatctaaaggtaagaaaaaaaattgtggattttttgattaagagttcgattctctttatttacctgtttagtaaaagtttattaataacaaatatatcgaaattcaaaatttattataaagtatctatagcttagaggctaaagcgatgagttcatacctcatgtacagtagttcaaatctacttagatataaatttttgtgtgttaaataatatatatttatcatatagaaaatgtggtggaactggaatacacaatggacttttatctgtgttaatatacacatattatatgagaatttgatattttaaaagaaataaaaaaataagaagataatttacaattctgaagtttattaatcaaactccaaagactttaaaataaaaatgtgattaatataaagtcaaaatttataaaaccaaactaaataaaaagtcttaaaatattttgaaggcccattttttgagggttcgagcccctccattttcaactttctcactattttaatataaaaaaaataattcagtaaaagtaaaatgttgaagttatagtttaactaataaaattttacattgtcaaagtaaagatgtgggtttaaatcccattaatttcgttttatctttaatagtctaactggttaagacgtttttttttcaagaaagagataggaattcaaatttcctttaaagattgtcttaaacaaagtaagtgcctgagtgttcaaaaggagtggcctgtagatccatagactagttcttcatcagttaaaatctgatcttacttacagcttatattgacaatatatggtgtaattgataacatattcatattgggaatgaaagatgttggtttaagtccaattattttgataaaaaatcaatttcatataaaaatttattgttatagaaagatatcttaacttggtaaagagtctagattgctagtttagaatatgagggtttaaatccctttctttcttttaatttaattaacaaatgtttagtgataatactatattcagccaattaatattaaatataaaatttggtttaacaattaaaaataaacttatttattgttttaatatatttataaataaatttttaaacagtaataaaaaaatattatatgacataaaaaaaaatattaaaaataatatgtttaattttagaaataaactaaattttaataaaagtaaaaaaaatattgtttccaaaaaaagaactggtaaatcaaggtcaggatcatcgtcatcacatactcttagaaaaggtttattgtggttcggtttaagaaatataaaattaaaagaaaaaaaatttaacaaaaatttattaaatagtttactaattgataataaaaatataataactattaataatttagaaataattaaatttatatattatattacatataataataataatttattcaaaataagtagtataaatactttttatttaaattctatacacaattataaacatttaataaacaataaaaagtgtataaatatagtgtattaaaaaatataaaatggtaattttcaaaataaactataataaaaaaataggtaaaaataattatggtcgcatagtaactagacatagagaaaagggtagaaaatcgttatatatacctatagatttgaattattttaattatgaaacagataaaaagttttatataagactgcttagtacggaatctaatcacatgtatagaaatacaaaactaattttaggtttaagtatggaaggtaaaactaaaggacaattaagatatataataaaaccaaacaaaaaatcattaggtgatttaataaaatttacggagaaaactagcaaacactttggagatattaactacttaaataattttgatataaacgataagttgtatagtttagaatttaaacctaaaataaaatctaaaatttgtttatcagcaaaatgtgtttctatacttttaaacaaagaaaataatttaataaaaataaaattaccttcaaacaaaataaaaaaattaaataataaatgttacgctgtttatggtaattctgaaaaagtaatttcaaattttaagcaaaaagctggtactgaaagactttttggtaatagacctaaagtaagaggttcagctatgaacgcttgtgaccatcctcatggtggtggagaaggtaaagctccaattggtagaagatcaatatgttcttttaaaggtaaaaaaactaaaggagttaaaacagttaaatttaaaaatgattatattaaataaatggaaaaaaatatttttagataaaaatacttatctaaaaaataaaaatagaaacttaaataaatattttgtctttaaaacatataatagaaatttaaaattatcttctttgtttaataacactacaataaaagtatataacggtattcgattcataccaataaaagttaattcattaaaatttggattaaaatgcagatatataattaataatgtctaaaatagtatctcctttattgttaagatttaaaaatatacctaattatttaaatacaatacatataaaactaaataataataaacactatttaacctattttaaattttttcaattattattgaattttatttatttatttaaaacaaagataggtaaatataaaaatttttcaaataaattattatatattaattcgaattattacgatttttttagtgtgcatatatctttaatattttataatttgaaaaaaaataaagcattattatttttgtataaaaatataataaaactttctaattatattaattatttcataaaatttaatttatatgcaagtaattattttgtttttatacatatgaaaaaattaaaatattataaaaataatatttattatgttataacatctataaaaaattttatagaaaaaaataaaaattttaaagtaagaatcatatattttattaattctttatttaaatcagataaatataatagaaaaataaatataataggtgcaaaatgtctatattcaggatgtttatataaaaactccaaaaaaaaatcatttaaatacgcaagaggaaatacatcattatcatttgtaatgtctaatgtagtatatgctaaaaaaagtgtgaaaactgacaatggtatggtaggtatcaaagtttggctatacagataattttcaatacattaaaatggttaatttgctattaaatactcataataaaaaatataagtctaatcatatgtataaattaaaaaacataaaaaaaaatattaaacttgattatggagattggggaattgtaacatgtaaaagtgatattataacaccgaaccaaatcgaagcttgtagatgttgtattgttagaaatatgagaaataaaggtaaaatttggataaaagtacgtcctactcatataatatctaaaaaacctaaagattctagaatgggatcaggaaaaggtacaatgtttaaattattgtatattttaaaaccaggagaaattatatttgaaggaatgaaaacacctttagacaatttagttaaaatatttaatttaattaataaaagactaaatattaaaattaaacttatattaaaaaaaaatgttttataacgcaataattattcataacgataaaaaatattcaatatattataatttaaaaaaaaaattaaacaataaatataaaaaattaattagatataataggtataataaaacatataatccaaggcaagaaacaaacgtatgtaataaaaagataactataaaaaaaaataaattttatataaataataatgagtaatttaggtgcaatattaaaaacgtctgataacagtggtatacaaaaattgaaaaatatacatatcatcgataaaaataaaaagttgaaagtaaataataaatctgtttcagtaataaaaaaaggaagaaatatgaaatttgattgtaaaaaatccgatatggttcgtgtgttaatagtatgtgcaaaaaatttagattttgttgttaataagggcacaaaatttagtactaattctgctgtattattcgatcaaaataaaatttgttgtaaaaaaataaaaggattagtttcttcaattattaaaggatatatatatggatcaaaagttaattttaaaaaagctaaatttatataatttaaataatgagttacatattaaaatactttgataaattttttaatttaattaatataagtataaactattttatattatatataaaaataatatataatgaaagtaacataataaatataataaaaattgtgcaaacgtgttttaacagtatgaaaaacaacaattatataatattgtttgaaattgactgtataaaatataaaagtataataaaagatatattgtttaaactttatagttctataacagatataaaaaataaaatagctgtaaatagttatattatattaagcaataatgagtacctggtacaagaaaatattattgctgatattgtatatactataataaaaaattataaattaatatatgaatcatttgatatttatatattctataaatcaagagcaataaaaatacaatttattgctattttaaaatttttaatatctatattagaaaattatatcaaagaaaaagaaaaaaaaccgtccatatttaccgtacatccattatttaaaattttgagaaaatttattaagtttttattatattgtggaaaagtttggacttttatagggatattggtatgtatttttcaaaaaataataaaaaattatagaatataaaaagaataataacatttttatatttacattagtaaattgttttaacattttttcataaattttaatattttaaattttatttagaaaaaaataataaaatataaaaaaaagtaatgaataatagaaaattaataactaaaataattttgtatagttacatttatgataataaaaattgtacagatataaattttataaaaaatttaatgttattttataaaaccgtttctagacaaagtcctgagataatattaaataagaaaaatgaaattgtaggttttaaaagcactcttttaaacaaaaatttagatttgtttttatataagttaataaattttacaatacctaaaataaaaaaagatttaatttttgatagtaaaaattttatattcgataataattataatgcttacttattattgcataataaaaaatatttttttgaatatagaacaattgcttctcttgattttaattgtacatttaatatacagttaatatttaataagtatgctgataatctagaaaagttaaactatataaaaaatattttaaacataaaatttaataaaaaataatgataacaaataaagttaaatataacaaatttaatcgtcaactatatgaaaaactttcatctactaatagtataaaaaatttaaaatatataaaattaaataataatatacgtcgtataacatttgataaaaattttgattatattaaaatacttcataaaccttcttcttattttaaattaaacaataaaaatctcataaaaacaaaaaaaaaattaaaatcaggttatttaattttatcaacacctttaggagtaatgacagataaaaaagctatattatatggtattggcggtactgtattgttatatattaataaaacccttaatgaataaaaataaaataggcttaatatttgataaatatgctaattggctatatacatttataaaagattgttttgacaatgaaaaatttattttatatataaataagtttatatataagtttacacttaccaataaaaaatttcttaactcaaaaattgattacaaatttttaaatctttttaataaaatcttgttaaaaacaataaaaattttaaaagagacaaaatcaataaatataattgtaagtaaaattgcgtatccgaatttattaatacaaaataaattaataataaaaattaataatttgagaaatactataatatatttaccacatattaatgatgtccaaataaatttaagtaatgcaaaagataaatttatacatttgtcgtcaaaaaatatagaatatgtcactaacttagcttcccttattaaaaatataaaaaaaatagatgtttgtactcatgtcggtatgtattattcggatgaaaaaataattattagaaaaagaaaatctcaaaaaaaaacgtaatgaattttaatataaatttaatattaaaaaaaattttgttaaaaaaccaaaaaaataatattaataatatatatttagataactatgacaataatatttatacaaatactaaaaattatacaccagatatgcgcatttataaaaataatatttttaaattaatttgtccttttagtaaaaaaatattatataataaaacaaagttaaaaaaaccattttataaaaaaaaaatagtacaaaaaattattttaaaaattcacagaacttcgttaacattaaaacgtagtagagtttttagatataaaattataacatgtgttggaacaaatagacaatgggtcggaataggagaaggtaaaaacaggttgtttaaaagatcatattcaaaatctgtgaatacagctaaacaaaatgtgtataatttaaattttgaatgtaatgattataaacagctaaaatataaaggatgcacatttaaagctcttaatatgacagaaaatagaaaaaacctaaaaatgtatgataatttaattaaagtttctggataccaaaaaataaaattagtttcatactcgtcaaaaacttctataaatgtattaaaatctatattacataatttttaacatttaaatatttaaaaataatgactaataaattaaaaaaaacaagaccaattataaataaacctttatatataaaagatattgacaatatagtcggtataaatttatataaaataaaatttatatttaatatgtataataacaatatatataaaaaaattagtaattataataaaattaattgtgaatataaaaatcttatagttaaatattctacttttaatttaaattcatttaaaaaaaattcaattaaatttaataacattcgattaaatacaataaaaaaaaataatgaaaacaaaaacgtccataaaacaaatatgtaatctttgcaaaatagtaagacgtaataagaggttagtaaatacttgtaagttacataaaaaccacaaacataaacaaaaatgaatataaaatatataacaaaaaaacataataaaaattataattcgattgtagtttgtgtatcttttaaaatgaataatatattcatatcgataagtaaaattattaaatttatgggacttttttcttttagtagattgttaaaatcatactcatgtgggttatgcaattttaaaaataaaaataaaaattctattaaagtttataacattatttcacgaaaattaaaagcttttttaatacataataattttaaaaaaataaatctaatatttaaaagtaataaaagaataaaatatatttttttaaatatattattaaatactatctatgctgataaacttatcaaaataagtagtatttatgtaagtatatctataccacataacggatgcaaattaaaaaaacgtagatttttataattttaataaaaatgacaactttaaatcaatccataaaaagaaaaaaacaaaacaaaaaaaaaataactgtacttaatcataatcctcaactagaaggatttctctgcagcataatatctatgtctcctaaaaaaccgaattctgcaaaaagaaaagtaggtattattgaactgaaaaataataaaaaaataaaagcatatataccaggagaaagatctgtagtaagagataaaactagagttttaataagaggaggcaatacaagagatttacctggtgttaatcataaaattgttttaaatatgatgaattgtcgtgaagataaaccaagacataataaaagatctaaatatggtgttaaaaaaattaaagcgaaaaaacgttgaaaatagtgctaaaaaagctgtacaatattacaacccatttatattaaatttattattaaattgtattaataaaaatggtaaaaaaaatgtatgtaaaaatttagtatttaattcgtctataaatataataaaaaataattgttttgtagaatactttgaaaatttagtactaaaaccaatattaccatttaaaattatttctgaaaaaaataaatctaaatatatatataccagtgcttataaatctatttctaatttaatattaaatgtgtgtaaattcataagaaaacataaaaaaaaagtatcttttgatttttatttcaaaaatgaaattaataaattattaaataaaaatagtaatttacacacattaaaaaaacaatttaaagtaatattcaaaaatacaagtactattaataaaaaaaatattaagaaaaaatctgaaaaaaatttgagtattaatattataaaattaaaaaaaattagtatgaaatattttaataactattttacttatcactttttaaactataacagtaataatgagcattcattttattcaaaaaaaatttttaacacacaatccttaataataaaaaaaaatattaaaaaattaaaatatttaaaaacaatataaaatgtcaaaagaacaatttttaagaaataaacctcatgtaaatataggtactattggacatgtagaccatggtaaaaccactttaacttctgctataacatcagttcttaagttaaagggatgcacagaaaaatcttattcttacgaagatatagattctacaaaagaagaaaaaaaaagaggtataactattaatactacacatgttgaatatgaaagtgatttaagacattacgctcatattgattgtcctggacacgctgattacataaaaaatatgataataggtgcagttcaaatggacggtgctatattagtaatatcgttagaagatggtcctatgcctcaaacaatagaacatttattattagctaaacaaataggtataaaaaaattagtagtatttttaaataaggaagataaggttgatgatgaagaaattatattttttataaaagaagaaacaaaaagcatgttagataaatatggattcgattcaacattaacacctttaataactggatccgccttaaaagccttagaagaaattaaacttttaaaggaaatagatttaaataataaatggatatcaaaagtaataaatttaattgacactgtagatagttatattgaaaaacctgaaagaaatttaaacaaaccatttttaatgcctatagaagatagtttttatataactggacgtggaacagttgttactggtagaatagaaaatggtatagtaaaattaaatgataaagtggaactttatggatatgataaatctaaacttacttctgttataggtatagaaatgtttaataagggactgtctcaaggtgaatctggtgataatgttgggttacttttacgtggtataattaaagaagacgttaaaagaggtcatgttgtagctaaacctaaatctttaaaattttattctgaatttaaagcaacattatatatattaacttcaaaagaaggtggtagaactaatccatttaaaattggatataaaccacaattttttataagaactttagatataacaggtgaaataaaaaaattatactcaacaacaaatgaaaataatactttagaattagccataccaggtgacaatataaatgccaacatatctttatcaaaatcaatagtacttgaaaaagaattaagattctctgtgagagaaggtggtaaaactattggtcatggtattataatagatttaataaaataaaatgaataaaaaaataagaaatagattaaaaaataatataaaaaaacaaaaaaacattaattatataagtttatgtttacacagtctattaaataagttaaaaaatgaaaaatgttaattagtttaataataagtatatgtatatacgcactgataacatattatggaaaagaaaaaggtctagtaattttggtaagttataatataatacggtatttattcaatgtaacagttgacgcgattaatactgtaaattatgaatctactataataggcatgatagttacatacggcttatatgtatatcgtaactattttcataaaattagaaaagcagtctattatttatacactcttccgcgtggtgttcttaatttctttattcctttacttccagaagtcttagttaatattttatggttgaaagaatatactttagcaacactactaggatttatttttaacttcatttataacgtaacaacggatcttatctcactttattgtaaataaaaatatacaaatgacaaatttaaaatagaaatgattgatttaaaattaaataaaataataaaatatatatatatagatataataaatactattgttataatctatataaatttgaaaaatattataataaatacaaataaaatattagataaaaatttattgttaaaatataattacaataagttgtttaacaaaatatttaatactataactttggatataacttataaaaaaaatcaattaataaaagtttataatgcaattgtttatatgtttaaaaaatatatattaaattattcgtttgtaaaactatgttggtattatataacagatttagatttaactaacttagaccttcatatacacaaaaaattagacatttatacagtatataaaaataaaataaaaatattactcatatttttaaaatcattattaatatatattatagataaatattactataaacatggtaaattatattttcttctaaaatatctaacaaataaagaaacatataaaatggtaaatactttaaataaattaatctctattaaagtaacagatttaatattttatcatgatgaacttaaatttttaattaaactattctataaaacagattacattattttaaataatatagacaaaataagatttcaaaacggataaaaaggtatagtttaatgttaaaatattgaaatttgatttcaatgatataggttagattcctatttcccttatcgttaaaaatttatgtcggtttagtttaaattttaaaacaaataattccagattatttaactgaaagttaaagtctttcaatcgatattaataagttatacaaactaactatatttaaattggtaatttaaataatagaaaatataagtttacaacatttaaatttatcaataaaaaattaaatctaattttatttatggttatatagcttaactttaaagcgaataaatgcaggttgtttgatcccagtgtaaatctgagtataaccttataacagaaaacaaatacaaaattactatattttacatttttattaaattttacccacaatatttattattcattttttttttataattaaataagtaaaattttaaaaaaattttaattttaataaaagatctaaatatagttattctcaactattattagcatagattactagcttaatttggtaaagtactcgttttttaatcgatttagtctgggttcgaatcccaggtgatctacattgacaaagtattttatttattttaaataaatatactttatcaattaaataaaattgtaaaaaaatttttacaaaaaataattatgtatcaaacttaaacaaaatgattaacaataaaaataaaacagaaaatatagttacaaataacgataaacaaataaaagatattcatacaactgattatattattgatttattatcaaacataataaattcaaaaaatatacaaaatataacagaaaacaataatatttcacattcttttaacatagaaactttttataaactttatgaaatatgtacaaaacatactattaaaacatcaacatctattaaaacatatattaatattataataaaatttataaaactattaataatatatctaattgaaaaatattattataactttaacgatatttactttatactaaaatcaagcaaagatatagaaacttttaatttttataccagtttcaacaatttaaagacatatttaaattctttcatacaaaaaaaaaataaaccaggtacaagacttagtgtttattatatcatactattactggtatatatatattttggtcctatatcatggtttttaataagagttcttactgatgctcaaaactggatggaacatactttggatacaatggttatcttaccacttccatttatacagtaagataaaaaagatgggattaaaaatttaacaattttttataacattgttagagaaaactataaccatactgcaataaaaaatgaataattcaacttatattactaaaaaacaattaaactataaaaaaaatattaaaacatgttattttaaataaaaaatgtctagaagcaaaaaatttttaaaatatatcaacagacatatatataattatttgttaaatacgaatactaaattaagacattataaagattttttattaaaaataatcaaatatgataaaataaaattattttttttagaaaattttattattagtagtcattttaattataaactaaaatgtattacatttaaattatatgtaaaatttttatcaaatattaaaattttaaataattttacttttgtaaataattataaagaagaaaaaaattatttttttaaaacatatataatatttgaacaattgattaaaatttataacgtaataaataaaaattttttaattataattgataagttacataaaaattacatatacgatttactggaaataaacgataaaaaaatcaacaaaattataagaacaaaatataacaaaaacaaacatacatattttactcctatttatgctagtacccaaaaaattaatattatattaaataaataccaagactataattatacatgcgaaagattacaatgttataattgtcgtaaaaacaataaatctttaatatataataaaaataatctttttgaaaaaaatttaaactctgtcgtatcagaaaatcataatcaaaatataattacttttatcaatactttcaatttcaatactaaatattcaatattcggacaaaacgaaaatattgatataatatctaaaaagttaattagattagacaacaataaatacaataaacctatagctaatttcttattatgtgggcctagtggtactggtaaaacagacatttgtaaaatactttctacatatttaggaagtgaaaaacaaaatttaataaaattagatatgagtgaacttgctgaagaacactcagtttcaagattattaggttctccacctggatatgttggaggtggaaaatctaagaaatcaaaaactttagttgatgaaataatagataaaccaaattcagtagttttattagatgaaatagaaaaagcttataaaagattatgttatatatttttacaaatattagatgagggaatattaatagattcaagtggaactgtaggaaattttactaattcttttgtagtatttactagtaatttaggtattagatcgtctaataaaaattctctttctgaacatgaatataaacaagatgtaataaatagtattactgattactttccacctgaatttataaacaggttagataacatattaatttttaattatttagatattaactctttatataatatatcgcataaatttgttaaaagttgttacaataatgtaataacaaaaaaaagatttaattatattgtatcattattatcctcatcttcatttggcggatctagattattattaaacaattttgacaaaatgttatcaaattcaaaaggacaagaaaaactgttcgtggactataaaaatcaattattaaaatgcgtgatcttataactgaaaaaatgtataatgaacacataaatattatacatgatatagtaaaaaataagtatataagcatgaaagaacttataactaatgaacaatatgttcttttttccgaagaagacgtatttttgcatatatatacattttttttaactttagaagttaataatttatatattttaaatgtaaacgaaaaatttgactgtagctattttacgtattatttaccaaatattagcgaaacaattaaaactgaatctcagtatataaacaattataaagtgagaattattaaatttaaaaatacttataaaactattttaataatagaaaatctagatttatttatgaaaatatataataaagaatatgatttagaaacatttaaacaaaaatttaacatttattctcctattatattattactctgtaaaggaaacgggtatgatataataaatgagctaaaaaataaaaaaaaaataagaaaaaatctggtttttaaagattgttttgaaaaatttataccttgtaagtcagtaagatcttttaacgatcttatacgtttttttttaactgaaataacatatattaaactacaatatagatctaatatcaattatgataatatatacagtatctgtaaaggtattgatgaaaaaaaattaaatattaatttttatagcacttctaacactgaaaattatttgaaatctaaattattcgatcaagatgaggctgtagaatctgttttataccgtattaaaaagctaagcaatgcaaatatagacgagacaaaacctttaggtagttggttattgtgcggtccaagcggtactggaaaaactgaattagcaaaaatattatgttataccatttttaattctcacgataatttaattaagataaatatggctgaatatgttgaaaaacatgcagtttcaaaattaataggatcgcctccaggatattctggctatggtgaagatactattttatctactaaatttaaaactggttcatcttttgttattctttttgatgaaatagaaaaagcacacacaagtataacagatttaatgttgcaaatattagacaaaggtaagcttactttatccaatggggatataataaattttaataattcatttattatatttacaagtaatatcggatacacataccaattaaaaggaaaaaacgtaatagataaaaattatattttggaagaaattagaaaattttttagaatagaatttttaaatagattaaacgatataataatatttaatgtaatgaacaactatgacagttttaataatgttttaaataaatttatcaaatcaacttattcaaaattttatttttatactaatattgtatataaacttaaatatgatattattgctctgttacacgacccattgtatggatctagacctttaagaagatttaacgaatatattattgataatttacttttttacaattatacttttaaagaaaataaaaattataatttatatcatttaaataactttaagaatattaatattggttataaatttagaccaataacttaatgtttatttaattgttatagaggactagtacaaaaggatagtacaattaatttgaggttaaacagtgtgagttcaaacctcacgtcctctttaattaaacaaaactaaaataatataatgaaaaaaatttatttaaattcaagatttaaaggatataaaaaaaatagaaaccatttactaaaaacaaataaaaatttttttttaggtaatactaattataaacaaaatatttttattaataataaatacacattaaatagatatttaaaatttaattttaatatatctgataatgtttataataatatgctatatagctataaaaaagtaaaaaatgaatagattaaaaaacaattttaaatacacgaataataataaagataaatttttaaatttaaataggaaaggtgacaaaatttattttaatgttattaacgatatatattttaaaaaacattataaatttaataaatttatgtcaggatacaagtattgtataaatttatctaattttaattctttatacgtaaaattcactataataaataaaagaaacagagaatatgtaaaccttgttaaatatctaaacgtattaaatagcaatattatatttttaaaaacaaaataaatgaaaaataatagaaaaaaaattaataatttatacaatgttataaacaataaaaacattagttttaccagtaagacaattttaaataatttatttataaaatttacatttaaaacgaaaaaaaattataaaaatgttatatctaaaaattttaaatatttaagagttttaaatttaaaataattttttaaatgaattgtactgttggtaacaatatataccatacttatataaattattttgtaaataatatatataattctctgagtagaaacataaactcaaaaataaataaatactataactattataaaaaatcaaaaatttttaaaaacataaaattttattttaatttattaacatttgaatcaaattattgctgcgacagtggacaaaataaatatttatacgatgggtacaattcatattactttataaacattccattacaaataaaatttaacaatttaaaaagtcgttttataaactacaatataataaatatacctaaaataaatcaatcaggagacataattttaaatggttatcttagattgcctatactatatttacaacttgctaccaataatattagctatattttcaatgaaaaaataactagaacttattttataaaaattaaaaataatatttatttgtatatttatctttacgatgattttattaccgtttatataaattcatataaaattaaaaacgatcttttttctatgtataataacgtatcttttaaaaataaatatataaatttttctaaaatagataacgttatttacgttatgaatttaaaaaataacaatataaaatatcatatatttgataaaacaattaatataaataactttgtaaacaatactatgtttatggatatactaagtatagtcaataaatttttaaatttaaatttaaaaaaaaaatttatacaaagcagtaataatttaataaataaatctacaaactctgttttaaaaactatatttagacaatttactaaatctgtaaccatattcgacatagaaaaatattgtgataaattattatataaaaaaaaaatttttagatcattcaatatagttttatttaaagaacatttacttgttaatccagttatacattataccgatcaattaaatgtcttgtcttatttaacaaataaattcaaaataaatatatttggatattctaactcatcaaatgataaatttaaagttagtacaaatttaagaaaaattcaaagtgattatatcggatttattaatatagttaacacacctgacggtgatacctgtggattaatatcaaaactagcaaataacacaatattagataaatttaaactaaaattaataaattgtaataatgagtattttgaaaattttacaaaaatagatataacgtctaaaaatctttataatatgacatcgaataattttataaatatcaaaaaaaactccacatttaaagtaaaacaaatagaagtttttaaaaataatgaatttaaattaataaatttcgataaaaataaaactaataaaaacttaaatgtttttaatacattatcaataactgaactaataatacctttcttatttaataatgacccatgtagaggcttaatgggatcaaaaatgcatactcaagccttacctttaatctataacgaacatccttatgttatgactaaatataaccatatgaatggactattatttaataaatgtataacttctttatgtgaaggtattatagtaagtgtaaacaattataaaattatagttatggacgataaaaacagatatttacattactatttatatccttttaatgtattagattacaattcatttgttagttataaacctatagtatgggttggagaaaaaataaatataggtaaaattttagctcttccttcagatttaaaacactctgaattcactttaggtgttaataatttacttaattatagtttttataatggatatgaacacgaagatgctatagttataaataaaaatttaattattgaggatattttaacatcgatttcattcgatgtatacgaggaatatctgtctataaataaattagattatgttgaacttactctaagacatttattagaatataatagatataatagatatttaataaatgaggttggtgtttctagtaatcaagattacatgttatttggtgatatattatctactaaaattagatatgaattatctttaagtaaaaataaaaaattttttaaagtttttaaattaatatttaaagaaaacaaaaaacttattgtttacacaaaaccattaacgataaaaagaggaggtgaaggtagattaataaaatatgaaatattaggatatagcaaatttagacaattagatgctatgtacccggaaataaatgtatcatatcttactttaagattttttatatttaaaatagatagaattaatataggtgataaattatgtggaagacatggaaataagggtgttgtatcaaaaatagtcgataatatagatttaccatatacatttagaggactttgtccatattcaataacaagtcctataggtgctttagctagaattaatttaggacagtttttagaaggatcatgtggttattttggtttaaactttaattgtagaattaaagctccaatcaacttgtataactatcatttatactctaacatgtatcttaaaaatatttttaattcattaaatgtttataataattcttatataaacttttctatagaaaaatatttaagagattttaaaacaggttatcaattaaaaaatttcaatttaatgcttatgccgtattttttaaaactaatgcacacttcaaaaagtaaatttcaatatagaactgtaggtaaatacagtagtttaactcaacaaccagttaaaggtaaaagagttaatggtagtcaaaaatttggcgaaatggaagtatgggctttagaatctcatgggtctgcttatactataagagaattaggatacataaaaacaaatgttaaatattttaaaaaatttgaacacaaaggctataaaggttctgaaactttcaaagttttaacattagagcttaaaaatgtgttaataaatataaatagagtagataattattcatatttcaatcaaaaaataaaatataattattaagtattttaaaatgatatcatacagcaatattgatttgtctttacttactcctgaaaatttaagtgatttgataattagaaaatattataataattgtataataggaattgtaataaattcatctaacttcttacataaaaaaaaaagatttagatatggaggtttattttgcgaagaaatttttgggttattgtatgtgtgcttaaatgaaagatgtgttagaatatataaatttaacgataatcctatacttaataaactatgtttaaattgtaaaaaaaatatgatatttaactataaaaggaaatatagatttgggtctatatttttacattttccaattttaaatgataactattttaacgattttataaagttgttaaaaatgtttaaaaaaatgagacaagaatattttaaaataacaaataaatttaaagttgccaattttaatttttttaataatatcttttttaattctaaaatggtaaaaaacaaatttttaaattttatagatttattatataaaattacatgtccattagaattatttaaaatgaaatttaatttatgtgataaaaaaaaaccaacagtaacagaaaaatttcataaatttattaaattgttaaataatttttcagattttaaaaaaatatttttaacattattccctatacttccagctggtcttagaatatattcatttgataataggagacaacccgttaattcagggttaaatgcgttatataaatgtattattgattttaataatagtataaatattacatgtgatgtagaatacaatttgaaatatatattcattttacatattgtaattaaggcaattttagatttttctaaacaaaagaatatttttaaacaaaaaaacgatttatataataaattacacggtaagtatggtgtctttagacaaaatttgcttggttatagagtagattattctgggagatctactatagttcctggtccatcactatctttagacattataggtttaccatttaatatgctttgtcattatgttagacgtaatgataatatttatatggaaaataaattttatgaatcttctctatacacacattatgctcaagataaattcgatttttttgaatattatttagatatgtattctgtaatagccaatagagctccaacattgcataaaatgaacgtacaaacttttaaacctatttttgttgaaggtgagtctattaaacttatgcctttgttatgtgtaggatataacgcagattttgatggagaccaaatgggaattttttctctcgtaaaatattattctataactgaatcttttaatatgttaagatctttagtaaatttacactctccaacaactaaaaaaagtgtttttaatttaacacaaggaatgttatcaggatattatactttatcaaattataactatttaacattgataaacaattatgtatcatctaattatatggacgcattagagtgttgtcaaaataatatactaattaattctcctatgttactaagaagttgtaatatgttttatttaactacagtaggtagactattgattggttttaatagatttgtactataaaaactaatcaattttatatatatataagttaaagaataaaaaattattaattattaaacatattcatattttgttagtaacaataatttaacatttattacgttttactattatgtatgaaataaaaatttttataaagtaaattaacggtagttagtaattttatttggataaatatacatttattatctttaatatgtattattaaaaatagtcataaatataaacttttattgaaagaaacatttaaacaatttcagcaaatttattattattttattgttagtggggaatttataggattgtttcgtttttttataaacgcatacttaaaccgttataaagtagtaaaaatatatttaaatttatattttacagcaagtttctattatttgtttaaaagtttaattttatttataaatatgattgactatgtaaaaagaaagaaaattttacataataaaaacacataaaaagtctatgaaaaataattctacttccaaaaaaaatattattttaatataatttataaaattgaaatatataacaaaaacaaaataatgagcctaacaattataagatcatatatggaaattcactacaaggttctattgaaaacttatagtgtaaaatacaatatattaaagaaaatatggtataaactttataattttataaaagatataataaataaagttaatgcgaatagttacatattattagctaacattgagtatttaaaaaataaaaacatgtttattgatcttatatatgctttaatatacaacaggaaggaaatttttaatatcattaaagttataattaaaaattttatcaattttttatcgcaattaataacatactattacatatattttttaaaaattttattatcacttatggtagaatatgttagaaaaaatgatagactttgttacttaactacaaaagaaatattaaaatttatcagaacatatattagaagtttattatatttagggaaaataattttcataatattgttggtattatgttgttcacattatttataaaattaaaatatacaataaaaaacaaaataatggacttaaaaatttataagatcatatatgtaaatccactataggattctctcaaaaacttacagtgtaaaacataatataatatacgaaatattacataaactttataattttataatacatataaagaataaaatatacatcaaagattacgtaccattgtttatacaaaataatatatatatatataaatgactatgttatattaataaatatagagtacctagaacaagaaagtattattgccgatctatatatagtaataaaaaatttataaactaatatataaacttgtttatacaatatattataaattgatatcagtaaaaaacaaattatagttactttaaaattgttaatacctatattaacaaactatatcaactaaaaggaaaaaaccaactatatttactataaattttacatataaaatgattagaaaaatcattggatttatattgtattgtgggagattaaggtattaataggtatatattattatgtgttcttcaagtaatataaaaacaataatacattataaagaatgaaaaaattaattatacaaaatttattcaaccttatcggtataataataactagtttaattgaatttatacttatattaataactgtttgtggattttttattataagtggtgatgtcattataataaattatatataaaaaaaataaaagttttaatgaattttttttatataatacctttctatataagacatatatttagctatgcaaactatatattattaactttttacatgccctatttaaaaaaacctacagaatcgctttttgtagaacccacatttagaagtattgagaaatttttcaattttttatcttcatgtttaaaattgatgggatttattcgtcttttaatatgcatatttaaactattattaaagatataaaaaaagtacaattatacatattaaaaaatgaaaaaactaatattattgaaattatttatatttataaagttaataataaaatattcaattaaatttacacttaaattaattacatttctacgtaatttttttagtaagttttaaatattttaataaaaaagttgcgaattagtaagatataaattttcagggcagataagttttgtggttaaaagtgtgtttaaatttatatatagacgttcacaaaatctttattcatgcttttaaaaatttaattgtttacaaatattattaaccgtgtaaaaagagaggatattttgcataattaaaaaaaaataaaatatacaataaaaaacagaataatggacctaaaaattataagatcatatgtggaaattcactataagattctatttgaaacttatcgtgtaagacataatacaatatatgaagtattatataaacttcataattttataatatacataaaaaataaaataaacatcagagattacgtaccattgtctgtacaaaataaaatcgatataaatgactatgttatattaggaaatatcgaatacctagaacaagaaagtattgttgccgatcttatatacacaataataaaaaattataagttaatatatgaacttgttgatacgtacatatattataaatcgatgtcagcaaaaaaacaagttattgttactttaaaatttttaatacctatattaacaaactatattaacgaaaaggaaaaaaaaccaactatatttattataaattctacatataaaatgattagaacaatcattagatttatactatatggtggaagattcggatcattaataggtatattattatgtgtccttcaagtaatataaaaaaaaataatacattataaagaatgaaaaaattaattatacaaaatttattagaccttatcggtactatagcaatctatttaattatatttatacataaatcaatagttgtttatgtattttttattctaagttgtgatattatcaatcaattatgtataaaaaaaagaaaaagttttaattaaatataaagatttaaatgggtaataaattaacaaattttttttatataatatctgactacataagatatatatttagctattcaaggtatatactgtttacattaaacatgtattatttagaaaaagctaccgtatcactttttggagaaccaacattcaaacgtcttgagaaatttgtcagtttattattgttaagtgtaaaatttatcggactgtttcgtcttttaatatgcatacttaaactattgtaataaaatattcaattaaatttacacttaaattaattaatttttttagtaagtttttttaaaattttaataaaaaagttgcgaattagtaagacataaattttcaaggtagataaattttgtggttaaaagtgtgtttaaatttatatatagacgttcacaaaatttttattcatgcttttaaaaatttaattgtttacaaatattattaaccgtgtaaaaagagaggatattttgcataattaaaaaaaataaaatatacaataaaaaacagaataatggacctaaaaattataagatcatatgtggaaattcactataagattctatttgaaacttatcgtgtaagacataatacaatatatgaagtattatataaactttataattttataatatacataaaaaataaaataaacatcagagattacgtaccattgtctgtacaaaataaaatcgatataaatgactatgttatattaggaaatatcgaatacctagaacaagaaagtattgttgccgatcttatatacataataataaaaaattataagttaatatatgaacttgttgatacgtatatatattataaatcgatgtcagcaaaaaaacaagttattgttactttaaaatttttaatacctatattaacaaactatattaacgaaaaggaaaaaaaaccaactatatttattataaattctacatataaaatgattagaacaatcattagatttatactatatggtggaagattcggatcattaataggtatattattatgtgtccttcaaataatataaaaaaaaataatacattataaagaatgaaaaaattaattatacaaaatttattagaccttatcggtattatagtaatygatttaattatatttatacataaatcaatagttgtttatgtattttttattctaagttgtaatattatcaatcaattatgtataaaaaaaagaaaaagttttaattaaatataaagatttaaatgggtaataaattaacaaattttttttatataatatctgactacataagatatatatttagctattcaaggtacatactgtttacattaaatatgtattatttagaaaaagctaccgtatcactttttggagaaccaacattcaaacgtcttgagaaatttgtcagtttattattgttaagtgtaaaatttatcggactgtttcgtcttttaatatgcatacttaaactattgtaataaaatattcaattaaatttacacttaaattaattaatttttttagtaagtttttttaaatattttaataaaaaagttgcgaattagtaagacataaattttcaaggtagataaattttgtggttaaaagtgtgtttaaatttatatatagacgttcacaaaatttttattcatgcttttaaaaatttaattgtttacaaatattattaaccgtgtaaaaagagaggatattttgcataattaaaaaaaaataaaatatacaattaaaaaacagaataatggacctaaaaattataagatcatacgtggaaattcactataagattctattaaaaacttatagtgtaaaacataatatattacgtaaaatatggcgtaaactttacaattttataaaagatataataaataaagttaacgccaataattacatattattagctaatatagaatatttaaataataaaaatatgtttatagattttatatacgctttaatatacaacagaaaagaagtttttaatgttattatagctgtaattaaaatttttatcaatttttcatccgaattaataacatactattatatatattttttaaaaattttattgtcatttatggtagaatatgttaaaaaaaatgacggattttgttatttaactataaaagaaatattaaagcttattataagatttattaaaggtttattatatttagggaaaatgatttccggaatatttttagtattatgtttttgccgtcgtatataaaataaaaattttaataaaaataaatgaataacagattaaataagttaatgaagtttgtatgtataatatacatttacataaaatatatattcagttatatgaaatatatatatatatgcctatttatttataatatttattttttcgaaacagctatggcatcaatgtttgcagtaactatgggagaatggtatttagaggagttttgggccagaagaaactttactatgttattttattcaacattatggtatattataacaaaaaaaataagagataaatttgaactattgagattggaatgggtgtggaaaattaaacgatcaaataattctataattaaaaaaattgcaaaatttttaagcaagtacgattggtttaataataacattataaacttttaaattaattttaattttatactacactcataaatatatataaaaagaaaaagttttaattaaatataaagatttaaatgggtaataaattaacaaattttttttatataatatcttcctacataagatatatatttagctattcaaggtatatattgtttacattaaacatgtattatttagaaaaagctaccgtatcactttttggagaaccaacattcaaacgtcttgagaaatttgtcagtttattattgttaagtgtaaaatttatcggactgtttcgtcttttaatatgcatacttaaactattgtaataaaatattcaattaaatttacacttaaattaattaatttttttagtaagtttttttaaatattttaataaaaaagttgcgaagtagtaagacataaattttcaaggtagataaattttgtggttaaaagtgtgtttaaatttatatatagacgttcacaaaatttttattcatgcttttaaaaatttaattgtttacaaatattattaaccgtgtaaaaagagaggatattttgcataattaaaaaaaaataaaatatacaataaaaaacagaataatggacctaaaaattataagatcataygtggaaattcactataagattctatttgaaacttatcgtgtaagacataatacaatatatgaaatattatataaactttataattttataatatacataaaaaataaaataaacatcagagattacgtaccattgtctatacaaaataaaatcgatataaatgactatgttatattaggaaatatcgaatatctagaacaagaaagtattgttgccgatcttatatatacaataataaaaaattataagttaatatatgaacttgttgatacgtacatatattataaatcgatatcagcaaaaaaacaagttattgttactttaaaatttttaatacctatattaacaaactatattaacgaaaaggaaaaaaaaccaactatatttattataaattctacatataaaatgattagaacaatcattagatttatactatatggtggaagatttggatcattaataggtatattattatgtgtccttcaagtaatataaaaaaataatacaaaagaaaatgaaaaatattgttagtaaaaactttaaatttttgtctttgtttaatttatttaatattgagaaatatttacaagagttggtgagtttaagttttgaatattcatcagaatttatttttagttataatacaaacgattttaaaaatattcctatagattatttccctaaaaatgtatcaaaaaatttaattttagataagtttttatatttaataaatatgtttttagaaagagattcgtttttcaattatttatatttatatttaattttaaactttaaaataaaatttaatcattttgttcaaattttaggcttaagaggtagagctgaaatgaaaggatataaaggttatattagtagtaatttgaattatggttttacgtttaaagattttatattatcatcatttaaagctcgtgaaagtattattgatagtagtgttaatatatattcatcgggttatcttactagaaagcttgtagaaggactaagagatatgaatataaaggaaattaaatgcactaccaagtatatttgtaaagatataaaaaataattgtgatttaaggttaccttttttatgtttaagtaataaagctacatgttctttttgtttaaatataataagtgataatactttatttcttggatataataaaggtataatttcagggcaagctttaggtgagccaagtactcaaatgttacttagaacgtttcatttaggcggtggcggtttaaaagttactaatataaataaaagtacacatgatttaaatgttaaagataaacataaatttataaacatagataataaaaataatgattttatgcatattaacagctataatagttataaaaataattgtaaaattaattatgattatgttaaattaataccatataataataaagttaacacttttgaaaataataaatattcaaaatttttaagtttatttaaaaattttagtgtgttatgggttcctattttatttaataaatatatatttaaatataatatttttaataattctaacagtaatataggattatatttaaaaaaatttttatcatgttacacacattaaaaacaagataatgatgtttttaaaaaatatattatcatttaaatttttaaacaaaaacaattttaaaaaagtaaacaaaaatatattcaatatagtaaataaattttttgaggaatattttatcaagtcaaatataaaaatttttcatttaagtaaatttaaattttatacttctaaaaataagttagaaaaatttaaacaaaaagaaaataatttatctattataaataaagtttttgaaggaagtaatagtataattattgataatcatagtttccattataattttggagttatatttaatacagaacaatctgacgattgttgtactttaaatactattaataagaattacgataatataaagtttacatgtaaatatatagaaaatatttataaacctgggtatatattatatcctttaacatttggtaattattgtgattcaaacaattttatatacagcatatacaaatatttaagtataaaaaattgtaatacgtatagatcgtgcatgatagcacttttttattattatatgggcttattgttttcattaattttattatataaaggaaataatatcaatgttttaaattctaatatatctgttatagtttcaagattatcgtcttttgtttttgtaacagattttaattattctgatatatatattagtaatatactttctattaaattaattagtataattaataactctttatatttatctaaaatagcaatttgtaattatagaccttatttagtcggtttaactaaatatatacttactaatagtggtattttttctaaattaagttttcaagatacattaaaaactcttaaaaatatcatattagagcctaaaatagattggaatgttgattgtaaatccaacgtaattttagctgattttatacctgttgggtcaggatggtatagatattttattaattaaaaatataagcaaatgaagtttttaacttttaataatttgttagagaaaaatatacatataagtaaattagaaaatataaaaaaatttgacgataatatatataaaattgtaaatgatagttgtataattaatttgacctacacatcagtttttttatacaaactttataagattttttatattcttaattcagaaaatttatatgtaacaataataaataattttaaattttatcgtaataaatttattaatttattgttaaaatttagtaataataatttttttaatagtagatactgggtaaaagggtttttaactaataaagaaatttcatacaatatattaatattaaacctttgggtggaaaaattttatttaaaatttattgatacgtatactaatcttcgtattccatataatattacaaaacttataaaaaaaatgcaacatatgtacggtagtttaaaacttaagcctttttccaaatttgtttttttattagacgctgataaagatacacatgttatgaaagaatgtattacttctaataaatttttaatgggtgtttgttcatatggcagtagcacagattttatagatttttatatatatatgaataaaaaaaatgaaatatcactaaattttttaacaaaatttattttaattgctagtatgaatggttgttttagtaaagtttttatttaattattatatagtttggttgttatttttacaatatttatttaattaattagtaaattttatgataatattttttaattttttaattatttataattaattttaaaagtaggaaatttacttataaacatacatcaatttattatcaatatatttatttaaatattcttatatatcatatcataaatttataataaaaagtagtaaaaaatttttaattaattttattatacatatgtaacgggcaaaatgtagtaattaacttgttagtgtcattgcctatacgttagtggttcaagtccactttttgcttattataattttattatatttataaatgtagtttttacttttgtttgtaaagttacgttctattttatattctttctttctattttttttaatggtaaataaaattttctaataattaataccactattttaaatactttcgtttttacctaggaaattcattttattaaaatttattttatatcaaaaagcttttatataagcggtttaaaataattttaaacgttttttaaaaattaattttgtttaaacaaagtgataatttaattttttgcaatttttgctaaatcttaaaacttctatataatatatatatatagaaatgtaaaaaaaattttaattaaataaatttttttattacggcaaaatgtagtaattaacttgttagtgtcattgcctatacgttagtggttcaagtccactttttgcttattataattttattatatttataaatgtagtttttacttttgtttgtaaagttacgttctattttatattctttctttctatttttttttaatggtaaataaaattttctaataattaataccactattttaaatactttcgtttttacctaggaaattcattttattaaaatttattttatatcaaaaagcttctatataagcggtttaaaataattttaaacgttttttaaaaattaattttgtttaaacaaagtgataatttaattttttgcaatttttactaaatattaaaacttctatataatatatatatatagaaatgtaaaaaaaattttaattaaataaatttttttattacggcaaaatgtagtaattaacttgttagtgtcattgcctatacgttagtggttcaagtccactttttgcttattataattttattatatttataaatgtagtttttacttttgtttgtaaagttacgttctattttatattctttctttttattttttttaatggtaaataaaattttctaataattaataccactattttaaatactttcgtttttacctaggaaattcattttattaaaatttattttatatcaaaaagcttctatataagcggtttaaaataattttaaacgttttttaaaaattaattttgtttaaacaaagtgataatttaattttttgcaatttttactaaatattaaaacttctatataatatatatatatagaaatgtaaaaaaaattttaattaaataaatttttttattacggcaaaatgtagtaattaacttgttagtgtcattgcctatacgttagtggttcaagtccactttttgcttattataattttattatatttataaatgtagtttttacttttgtttgtaaagttacgttctattttatattctttctttctatttttttttaatggtaaataaaattttctaataattaataccactattttaaatactttcgtttttacctaggaaattcattttattaaaatttattttatatcaaaaagcttctatataagcggtttaaaataattttaaacgttttttaaaaattaattttgtttaaacaaagtgataatttaattttttgcaatttttactaaatattaaaacttctatataatatatatatatatagaaatgtaaaaaaaattttaattaaataaatttttttattacggcaaaatgtagtaattaacttgttagtgtcattgcctatacgttagtggttcaagtccactttttgcttattataattttattatatttataaatgtagtttttacttttgtttgtaaagttacgttctattttatattctttctttctattttttttaatggtaaataaaattttctaataattaataccactattttaaatactttcgtttttacctaggaaattcattttattaaaatttattttatatcaaaaagcttctatataagcggtttaaaataattttaaacgttttttaaaaattaattttgtttaaacaaagtgataatttaattttttgaaatttttactaaatattaaaacttctatataatatatatatatagaaatgtaaaaaaaattttaattaaataaatttttttattacggcaaaatgtagtaattaacttgttagtatcattgcctatacgttaacgattaaaatttatttttattttgtttttatcttaatagcttaatatggataaagtagtcgattgttaatcgatttatattggttcaattccaatttaaggtgattatttgtatattaaatattacaaatttatagtttaaatggaaaaacaaaaattttctaaatttttaatataagttcgaatcttattaaatttgtttataaataaataataaatatgacgaaataggtagacgtactaaatttaggatttagaatttaagagttcgattctctttatttatactttatttactaccaaaatagctcaatatggttagagttatggtgtgaaggaccataggtaatcagttcgaatctgatttttggtgttatatataatttatgtaaaagttaaaaattaaaataaatatattatttagatgattaatttaatggtaaaatgtttaatttacatttaaaataaattggttcgattccaatatcgtctatatgtaattcattttttaaatttgggaatataatttaatataaaatattacttttgcgtagtgactatggaggttataatcctcttatttccattttaatgagtatataggacttttagcttaattgttaaagtttacatgtgatatatgtgagagttttggttaaaatccaaaaaagtccaattataaacttataagtagatctgtagcttaattagataaagtatgtaactacgaaatacacgatgaaggtttaattcctttcagatctt

SEQ ID NO: 78 - protein, 10 aa, Artificial Sequence
  Description of Artificial Sequence: Synthetic peptide
MRVKKVLLYT

SEQ ID NO: 79 - DNA, 43 bp, Artificial Sequence
  Description of Artificial Sequence: Synthetic primer
  CDS (1)..(24)
ttacctcaaaaattaaacaccctttagtaatttttctcgagcg

SEQ ID NO: 80 - protein, 8 aa, Artificial Sequence
  Description of Artificial Sequence: Synthetic peptide
LPQKLNTL

SEQ ID NO: 81 - protein, 9 aa, Artificial Sequence
  Description of Artificial Sequence: Synthetic peptide
ITPSVPPTI

SEQ ID NO: 82 - protein, 10 aa, Artificial Sequence
  Description of Artificial Sequence: Synthetic peptide
MKLAARLISL

SEQ ID NO: 83 - DNA, 39 bp, Artificial Sequence
  Description of Artificial Sequence: Synthetic primer
  CDS (1)..(21)
ggagaagcctccggcacttcatagtaatttttctagacc

SEQ ID NO: 84 - protein, 7 aa, Artificial Sequence
  Description of Artificial Sequence: Synthetic peptide
GEASGTS

SEQ ID NO: 85 - protein, 7 aa, Artificial Sequence
  Description of Artificial Sequence: Synthetic peptide
MKLNTIA

SEQ ID NO: 86 - DNA, 33 bp, Artificial Sequence
  Description of Artificial Sequence: Synthetic primer
  CDS (1)..(18)
cctttgctaggactagactgatttttctagagc

SEQ ID NO: 87 - protein, 6 aa, Artificial Sequence
  Description of Artificial Sequence: Synthetic peptide
PLLGLD

SEQ ID NO: 88 - protein, 8 aa, Artificial Sequence
  Description of Artificial Sequence: Synthetic peptide
MSHLMNLP

SEQ ID NO: 89 - DNA, 32 bp, Artificial Sequence
  Description of Artificial Sequence: Synthetic primer
  CDS (1)..(30)
caaagcgcactaccacaacccaaactcgagtc

SEQ ID NO: 90 - protein, 10 aa, Artificial Sequence
  Description of Artificial Sequence: Synthetic peptide
QSALPQPKLE

SEQ ID NO: 91 - protein, 9 aa, Artificial Sequence
  Description of Artificial Sequence: Synthetic peptide
MPKNKGKGG

SEQ ID NO: 92 - protein, 7 aa, Artificial Sequence
  Description of Artificial Sequence: Synthetic peptide
MAQIPVD

SEQ ID NO: 93 - DNA, 33 bp, Artificial Sequence; identical to SEQ ID NO: 86
  Description of Artificial Sequence: Synthetic primer
  CDS (1)..(18)

SEQ ID NO: 94 - protein, 6 aa, Artificial Sequence
  Description of Artificial Sequence: Synthetic peptide
PLLGLD

SEQ ID NO: 95 - DNA, 2814 bp, Theileria parva
  CDS (1800)..(2321)
ggaaacagctatgaccatgattacgaattgcggccgcaattctgaatgttaaatgttatactttggatgaagctataaatatgcattggaaaaataatccatttaaagaaaggattcaaatactacaaaacctaagcgataatatgttaactaagcttattcttaacgacgctttaaatatacacaaataaacataatttttgtataacctaacaaataactaaaacataaaaataataaaaggaaatgtaatatcgtaattattttactcaggaatggggttaaatatttatatcacgtgtatatctatactgttatcgtatactctttacaattactattacgaatatgcaagagataataagattacgtatttaagagaatcttgtcatgataattgggtacgacatagtgataaatgctatttcgcatcgttacataaagtcagttggaaagatggatttgacagatgtaacttaataggtgcaaaaatgttaaataacagcattctatcggaagataggataccagttatattatacaaaaatcactggttggataaaacagattctgcaatattcgtaaaagatgaagattactgcgaatttgtaaactatgacaataaaaagccatttatctcaacgacatcgtgtaattcttccatgttttatgtatgtgtttcagatattatgagattactataaactttttgtatacttatattccgtaaactatattaatcatgaagaaaatgaaaaagtatagaagctgttcacgagcggttgttgaaaacaacaaaattatacattcaagatggcttacatatacgtctgtgaggctatcatggataatgacaatgcatctctaaataggtttttggacaatggattcgaccctaacacggaatatggtactctacaatctcctcttgaaatggctgtaatgttcaagaataccgaggctataaaaatcttgatgaggtatggagctaaacctgtagttactgaatgcacaacttcttgtctgcatgatgcggtgttgagagacgactacaaaatagtgaaagatctgttgaagaataactatgtaaacaatgttctttacagcggaggctttactcctttgtgtttggcagcttaccttaacaaagttaatttggttaaacttctattggctcattcggcggatgtagatatttcaaacacggatcggttaactcctctacatatagccgtatcaaataaaaatttaacaatggttaaacttctattgaacaaaggtgctgatactgacttgctggataacatgggacgtactcctttaatgatcgctgtacaatctggaaatattgaaatatgtagcacactacttaaaaaaaataaaatgtccagaactgggaaaaattgatcttgccagctgtaattcatggtagaaaagaagtgctcaggctacttttcaacaaaggagcagatgtaaactacatctttgaaagaaatggaaaatcatatactgttttggaattgattaaagaaagttactctgagacacaaaagaggtagctgaagtggtactctcaaaggtacgtgactaattagctataaaaaggatccgggttaattaattagtcatcaggcagggcgagaacgagactatctgctcgttaattaattagagcttctttattctatacttaaaaagtgaaaataaatacaaaggttcttgagggttgtgttaaattgaaagcgagaaataatcataaattatttcattatcgcgatatccgttaagtttgtatcgtaatgaaattggccgccagattaattagcctttactttattatttacattttacattccccagtgctgggaggtaattgtagtcatgaagaactaaaaaaattgggaatgctagagggcgatggtttcgacagggatgcattgttcaaatcatcacatggtatgggaaaggtaggaaaaaggtatggtcttaaaactactccaaaagtagataaagtcttagcagatcttgaaacactgtttggaaaacacggtcttggtggtattagtaaagattgtcttaaatgttttgcacaaagcctagtgtgcgtattaatgaaatgtagaggagcatgtctcaaaggaccatgtactgacgactgccaaaattgctttgatagaaactgtaaatctgcattgctggaatgcattgggaaaacaagtattccaaatccatgtaaatggaaagaagattatctaaaatacaaatttcctgaaacagatgaggacgaatctacgaaaaaaggagaagcctccggcacttcatagtaatttttctagaatcgatcccgggtttttatgactagttaatcacggccgcttataaagatctaaaatgcataatttctaaataatgaaaaaaagtacatcatgagcaacgcgttagtatattttacaatggagattaacgctctataccgttctatgtttattgattcagatgatgttttagaaaagaaagttattgaatatgaaaactttaatgaagatgaagatgacgacgatgattattgttgtaaatctgttttagatgaagaagatgacgcgctaaagtatactatggttacaaagtataagtctatactactaatggcgacttgtgcaagaaggtatagtatagtgaaaatgttgttagattatgattatgaaaaaccaaataaatcagatccatatctaaaggtatctcctttgcacataatttcatctattcctagtttagaatacctgcagccaagcttggcactggccgtcgttttac
